(19) United States
(12) Patent Application Publication
(10) Pub. No.: US 2022/0089737 A1
(43) Pub. Date: Mar. 24, 2022

(54) MULTI-SPECIFIC IMMUNE TARGETING MOLECULES AND USES THEREOF

(71) Applicant: JANSSEN BIOTECH, INC., Horsham, PA (US)

(72) Inventors: Rajkumar GANESAN, Blue Bell, PA (US); Michael Riis HANSEN, Broomall, PA (US); Iqbal S. GREWAL, Newtown, PA (US); Sanjaya SINGH, Blue Bell, PA (US)

(73) Assignee: JANSSEN BIOTECH, INC., Horsham, PA (US)

(21) Appl. No.: 17/472,237

(22) Filed: Sep. 10, 2021

Related U.S. Application Data
(60) Provisional application No. 63/165,050, filed on Mar. 23, 2021.
(60) Provisional application No. 63/077,458, filed on Sep. 11, 2020.
(60) Provisional application No. 63/077,415, filed on Sep. 11, 2020.
(60) Provisional application No. 63/077,407, filed on Sep. 11, 2020.

(51) Int. Cl. C07K 16/28; C07K 16/30; C07K 16/46; A61P 35/00

(52) U.S. Cl. CPC C07K 16/2818; C07K 16/3069; C07K 16/2878; C07K 2317/31; A61P 35/00; C07K 2317/24; C07K 2317/565; C07K 16/468

(57) ABSTRACT

Provided herein are trispecific antibodies or antigen binding fragments thereof that bind to Vβ17, CD28 and another target (e.g., a cancer antigen, such as BCMA or PSMA) are described. Also described are nucleic acids encoding the antibodies, compositions comprising the antibodies, methods of producing the antibodies, and methods of using the antibodies for treating or preventing diseases.

### CROSS-REFERENCE TO RELATED APPLICATIONS

[0001] This application claims the benefit of U.S. Ser. No. 63/077,458 filed Sep. 11, 2020; U.S. Ser. No. 63/077,415 filed Sep. 11, 2020; U.S. Ser. No. 63/077,407 filed Sep. 11, 2020; and U.S. Ser. No. 63/165,050 filed Mar. 23, 2021, the disclosure of each of which is incorporated by reference herein in its entirety.

### FIELD

[0002] Provided herein are, among other things, molecules that bind to Vβ17, CD28 and a cancer antigen (e.g., a tumor associated antigen (TAA)), including trispecific antibodies that bind to Vβ17, CD28 and the cancer antigen, as well as antigen binding fragments thereof. Provided herein are, among other things, molecules that bind to Vβ17, CD28 and BCMA, including trispecific antibodies that bind to Vβ17, CD28 and BCMA, and antigen binding fragments thereof. Provided herein are, among other things, molecules that bind to Vβ17, CD28 and PSMA, including trispecific antibodies that bind to Vβ17, CD28 and PSMA, and antigen binding fragments thereof. Also provided are nucleic acids and expression vectors encoding the antibodies, recombinant cells containing the vectors, and compositions comprising the antibodies. Methods of making the antibodies, and methods of using the antibodies to modulate an immune response, are also provided.

### REFERENCE TO SEQUENCE LISTING SUBMITTED ELECTRONICALLY

[0003] This application contains a sequence listing, which is submitted electronically via EFS-Web as an ASCII formatted sequence listing with a file “14620-275-999_SL.txt” and a creation date of Sep. 6, 2021 and having a size of 980,276 bytes. The sequence listing submitted via EFS-Web is part of the specification and is herein incorporated by reference in its entirety.

### SUMMARY

[0004] In one aspect, provided herein is a trispecific antibody comprising a first binding domain that binds to Vβ17, a second binding domain that binds to a second target, and a third binding domain that binds to CD28. In some embodiments, the second target is a cancer antigen. In some embodiments, the second target is a tumor-specific antigen. In some embodiments, the second target is a tumor associated antigen (TAA). In some embodiments, the second target is a neoantigen. In some embodiments, the second target is BCMA. In some embodiments, the second target is PSMA.

[0005] In another aspect, provided is a trispecific antibody comprising: (a) a first binding domain that binds to Vβ17, (b) a second binding domain that binds to cancer antigen, and (c) a third binding domain that binds to CD28. In one embodiment, the cancer antigen is BCMA. In one embodiment, the cancer antigen is PSMA.

[0006] In some embodiments of the trispecific antibody, the first binding domain that binds to Vβ17 comprises: (i) a VH comprising a VH CDR1, a VH CDR2, and a VH CDR3 having an amino acid sequence of a VH CDR1, VH CDR2, and VH CDR3, respectively, of SEQ ID NO:9; and (ii) a VL comprising a VL CDR1, a VL CDR2, and a VL CDR3 having an amino acid sequence of a VL CDR1, VL CDR2, and VL CDR3, respectively, of SEQ ID NO:10. In some embodiments, the first binding domain that binds to Vβ17 comprises: (i) a VH comprising a VH CDR1, a VH CDR2, and a VH CDR3 having an amino acid sequence of a VH CDR1, VH CDR2, and VH CDR3, respectively, of SEQ ID NO:19; and (ii) a VL comprising a VL CDR1, a VL CDR2, and a VL CDR3 having an amino acid sequence of a VL CDR1, VL CDR2, and VL CDR3, respectively, of SEQ ID NO:22. In some embodiments, the first binding domain that binds to Vβ17 comprises: (i) a VH comprising a VH CDR1, a VH CDR2, and a VH CDR3 having an amino acid sequence of a VH CDR1, VH CDR2, and VH CDR3, respectively, of SEQ ID NO:19; and (ii) a VL comprising a VL CDR1, a VL CDR2, and a VL CDR3 having an amino acid sequence of a VL CDR1, VL CDR2, and VL CDR3, respectively, of SEQ ID NO:23. In some embodiments, the first binding domain that binds to Vβ17 comprises: (i) a VH comprising a VH CDR1, a VH CDR2, and a VH CDR3 having an amino acid sequence of a VH CDR1, VH CDR2, and VH CDR3, respectively, of SEQ ID NO:19; and (ii) a VL comprising a VL CDR1, a VL CDR2, and a VL CDR3 having an amino acid sequence of a VL CDR1, VL CDR2, and VL CDR3, respectively, of SEQ ID NO:24. In some embodiments, the first binding domain that binds to Vβ17 comprises: (i) a VH comprising a VH CDR1, a VH CDR2, and a VH CDR3 having an amino acid sequence of a VH CDR1, VH CDR2, and VH CDR3, respectively, of SEQ ID NO:20; and (ii) a VL comprising a VL CDR1, a VL CDR2, and a VL CDR3 having an amino acid sequence of a VL CDR1, VL CDR2, and VL CDR3, respectively, of SEQ ID NO:22. In some embodiments, the first binding domain that binds to Vβ17 comprises: (i) a VH comprising a VH CDR1, a VH CDR2, and a VH CDR3 having an amino acid sequence of a VH CDR1, VH CDR2, and VH CDR3, respectively, of SEQ ID NO:20; and (ii) a VL comprising a VL CDR1, a VL CDR2, and a VL CDR3 having an amino acid sequence of a VL CDR1, VL CDR2, and VL CDR3, respectively, of SEQ ID NO:23. In some embodiments, the first binding domain that binds to Vβ17 comprises: (i) a VH comprising a VH CDR1, a VH CDR2, and a VH CDR3 having an amino acid sequence of a VH CDR1, VH CDR2, and VH CDR3, respectively, of SEQ ID NO:20; and (ii) a VL comprising a VL CDR1, a VL CDR2, and a VL CDR3 having an amino acid sequence of a VL CDR1, VL CDR2, and VL CDR3, respectively, of SEQ ID NO:24. In some embodiments, the first binding domain that binds to Vβ17 comprises: (i) a VH comprising a VH CDR1, a VH CDR2, and a VH CDR3 having an amino acid sequence of a VH CDR1, VH CDR2, and VH CDR3, respectively, of SEQ ID NO:21; and (ii) a VL comprising a VL CDR1, a VL CDR2, and a VL CDR3 having an amino acid sequence of a VL CDR1, VL CDR2, and VL CDR3, respectively, of SEQ ID NO:22. In some embodiments, the first binding domain that binds to Vβ17 comprises: (i) a VH comprising a VH CDR1, a VH CDR2, and a VH CDR3 having an amino acid sequence of a VH CDR1, VH CDR2, and VH CDR3, respectively, of SEQ ID NO:21; and (ii) a VL comprising a VL CDR1, a VL CDR2, and a VL CDR3 having an amino acid sequence of a VL CDR1, VL CDR2, and VL CDR3, respectively, of SEQ ID NO:23. In some embodiments, the first binding domain that binds to Vβ17 comprises: (i) a VH comprising a VH CDR1, a VH CDR2, and a VH CDR3 having an amino acid sequence of a VH CDR1, VH CDR2, and VH CDR3, respectively, of SEQ ID NO:21; and (ii) a VL comprising a VL CDR1, a VL CDR2, and a VL CDR3 having an amino acid sequence of a VL CDR1, VL CDR2, and VL CDR3, respectively, of SEQ ID NO:24. In some embodiments, the first binding domain that binds to Vβ17 comprises: (i) a VH comprising a VH CDR1, a VH CDR2, and a VH CDR3 having an amino acid sequence of a VH CDR1, VH CDR2, and VH CDR3, respectively, of SEQ ID NO:46; and (ii) a VL comprising a VL CDR1, a VL CDR2, and a VL CDR3 having an amino acid sequence of a VL CDR1, VL CDR2, and VL CDR3, respectively, of SEQ ID NO:49. In some embodiments, the first binding domain that binds to Vβ17 comprises: (i) a VH comprising a VH CDR1, a VH CDR2, and a VH CDR3 having an amino acid sequence of a VH CDR1, VH CDR2, and VH CDR3, respectively, of SEQ ID NO:77; and (ii) a VL comprising a VL CDR1, a VL CDR2, and a VL CDR3 having an amino acid sequence of a VL CDR1, VL CDR2, and VL CDR3, respectively, of SEQ ID NO:78. In some embodiments, the first binding domain that binds to Vβ17 comprises: (i) a VH comprising a VH CDR1, a VH CDR2, and a VH CDR3 having an amino acid sequence of a VH CDR1, VH CDR2, and VH CDR3, respectively, of SEQ ID NO:79; and (ii) a VL comprising a VL CDR1, a VL CDR2, and a VL CDR3 having an amino acid sequence of a VL CDR1, VL CDR2, and VL CDR3, respectively, of SEQ ID NO:80. In some embodiments, the first binding domain comprises a VH having an amino acid sequence of SEQ ID NO:79. In some embodiments, the first binding domain that binds to Vβ17 comprises: (i) a VH comprising a VH CDR1, a VH CDR2, and a VH CDR3 having an amino acid sequence of a VH CDR1, VH CDR2, and VH CDR3, respectively, of SEQ ID NO:81; and (ii) a VL comprising a VL CDR1, a VL CDR2, and a VL CDR3 having an amino acid sequence of a VL CDR1, VL CDR2, and VL CDR3, respectively, of SEQ ID NO:82. In some embodiments, the first binding domain that binds to Vβ17 comprises: (i) a VH comprising a VH CDR1, a VH CDR2, and a VH CDR3 having an amino acid sequence of a VH CDR1, VH CDR2, and VH CDR3, respectively, of SEQ ID NO:83; and (ii) a VL comprising a VL CDR1, a VL CDR2, and a VL CDR3 having an amino acid sequence of a VL CDR1, VL CDR2, and VL CDR3, respectively, of SEQ ID NO:84. In some embodiments, the first binding domain that binds to Vβ17 comprises: (i) a VH comprising a VH CDR1, a VH CDR2, and a VH CDR3 having an amino acid sequence of a VH CDR1, VH CDR2, and VH CDR3, respectively, of SEQ ID NO:85; and (ii) a VL comprising a VL CDR1, a VL CDR2, and a VL CDR3 having an amino acid sequence of a VL CDR1, VL CDR2, and VL CDR3, respectively, of SEQ ID NO:86. In some embodiments, the first binding domain that binds to Vβ17 comprises: (i) a VH comprising a VH CDR1, a VH CDR2, and a VH CDR3 having an amino acid sequence of a VH CDR1, VH CDR2, and VH CDR3, respectively, of SEQ ID NO:87; and (ii) a VL comprising a VL CDR1, a VL CDR2, and a VL CDR3 having an amino acid sequence of a VL CDR1, VL CDR2, and VL CDR3, respectively, of SEQ ID NO:88. In some embodiments, the first binding domain that binds to Vβ17 comprises: (i) a VH comprising a VH CDR1, a VH CDR2, and a VH CDR3 having an amino acid sequence of a VH CDR1, VH CDR2, and VH CDR3, respectively, of SEQ ID NO:21; and (ii) a VL comprising a VL CDR1, a VL CDR2, and a VL CDR3 having an amino acid sequence of a VL CDR1, VL CDR2, and VL CDR3, respectively, of SEQ ID NO:665. In some embodiments, the first binding domain that binds to Vβ17 comprises: (i) a VH comprising a VH CDR1, a VH CDR2, and a VH CDR3 having an amino acid sequence of a VH CDR1, VH CDR2, and VH CDR3, respectively, of SEQ ID NO:1084; and (ii) a VL comprising a VL CDR1, a VL CDR2, and a VL CDR3 having an amino acid sequence of a VL CDR1, VL CDR2, and VL CDR3, respectively, of SEQ ID NO:1085. In some embodiments, the VH CDR1, VH CDR2, VH CDR3, VL CDR1, VL CDR2, and VL CDR3 amino acid sequences of the first binding domain are according to the Kabat numbering system. In some embodiments, the VH CDR1, VH CDR2, VH CDR3, VL CDR1, VL CDR2, and VL CDR3 amino acid sequences of the first binding domain are according to the Chothia numbering system. In some embodiments, the VH CDR1, VH CDR2, VH CDR3, VL CDR1, VL CDR2, and VL CDR3 amino acid sequences of the first binding domain are according to the AbM numbering system. In some embodiments, the VH CDR1, VH CDR2, VH CDR3, VL CDR1, VL CDR2, and VL CDR3 amino acid sequences of the first binding domain are according to the Contact numbering system. In some embodiments, the VH CDR1, VH CDR2, VH CDR3, VL CDR1, VL CDR2, and VL CDR3 amino acid sequences of the first binding domain are according to the IMGT numbering system. In some embodiments, the VH CDR1, VH CDR2, VH CDR3, VL CDR1, VL CDR2, and VL CDR3 amino acid sequences of the first binding domain are according to the Exemplary numbering system. In some embodiments, the first binding domain binds to Vβ17 that is present on the surface of a T cell.

[0007] In some embodiments, the cancer antigen is present on the surface of a cell.

[0008] In some embodiments, the cancer antigen is BCMA. In some embodiments, the BCMA is present on the surface of a B cell. In some embodiments of the trispecific antibody provided herein, the second binding domain that binds to BCMA comprises: (i) a VH comprising a VH CDR1, a VH CDR2, and a VH CDR3 having an amino acid sequence of a VH CDR1, VH CDR2, and VH CDR3, respectively, of SEQ ID NO:95; and (ii) a VL comprising a VL CDR1, a VL CDR2, and a VL CDR3 having an amino acid sequence of a VL CDR1, VL CDR2, and VL CDR3, respectively, of SEQ ID NO:96. In some embodiments of the trispecific antibody provided herein, the second binding domain that binds to BCMA comprises: (i) a VH comprising a VH CDR1, a VH CDR2, and a VH CDR3 having an amino acid sequence of a VH CDR1, VH CDR2, and VH CDR3, respectively, of SEQ ID NO:1052; and (ii) a VL comprising a VL CDR1, a VL CDR2, and a VL CDR3 having an amino acid sequence of a VL CDR1, VL CDR2, and VL CDR3, respectively, of SEQ ID NO:1053. In some embodiments, the VH CDR1, VH CDR2, VH CDR3, VL CDR1, VL CDR2, and VL CDR3 amino acid sequences of the second binding domain are according to the Kabat numbering system. In some embodiments, the VH CDR1, VH CDR2, VH CDR3, VL CDR1, VL CDR2, and VL CDR3 amino acid sequences of the second binding domain are according to the Chothia numbering system. In some embodiments, the VH CDR1, VH CDR2, VH CDR3, VL CDR1, VL CDR2, and VL CDR3 amino acid sequences of the second binding domain are according to the AbM numbering system. In some embodiments, the VH CDR1, VH CDR2, VH CDR3, VL CDR1, VL CDR2, and VL CDR3 amino acid sequences of the second binding domain are according to the Contact numbering system. In some embodiments, the VH CDR1, VH CDR2, VH CDR3, VL CDR1, VL CDR2, and VL CDR3 amino acid sequences of the second binding domain are according to the IMGT numbering system. In some embodiments, the VH CDR1, VH CDR2, VH CDR3, VL CDR1, VL CDR2, and VL CDR3 amino acid sequences of the second binding domain are according to the Exemplary numbering system.

[0009] In some embodiments, the cancer antigen is PSMA. In some embodiments, the PSMA is present on the surface of a prostate cell. In some embodiments of the trispecific antibody provided herein, the second binding domain that binds to PSMA comprises: (i) a VH comprising a VH CDR1, a VH CDR2, and a VH CDR3 having an amino acid sequence of a VH CDR1, VH CDR2, and VH CDR3, respectively, of SEQ ID NO:1046; and (ii) a VL comprising a VL CDR1, a VL CDR2, and a VL CDR3 having an amino acid sequence of a VL CDR1, VL CDR2, and VL CDR3, respectively, of SEQ ID NO:1047. In some embodiments, the VH CDR1, VH CDR2, VH CDR3, VL CDR1, VL CDR2, and VL CDR3 amino acid sequences of the second binding domain are according to the Kabat numbering system. In some embodiments, the VH CDR1, VH CDR2, VH CDR3, VL CDR1, VL CDR2, and VL CDR3 amino acid sequences of the second binding domain are according to the Chothia numbering system. In some embodiments, the VH CDR1, VH CDR2, VH CDR3, VL CDR1, VL CDR2, and VL CDR3 amino acid sequences of the second binding domain are according to the AbM numbering system. In some embodiments, the VH CDR1, VH CDR2, VH CDR3, VL CDR1, VL CDR2, and VL CDR3 amino acid sequences of the second binding domain are according to the Contact numbering system. In some embodiments, the VH CDR1, VH CDR2, VH CDR3, VL CDR1, VL CDR2, and VL CDR3 amino acid sequences of the second binding domain are according to the IMGT numbering system. In some embodiments, the VH CDR1, VH CDR2, VH CDR3, VL CDR1, VL CDR2, and VL CDR3 amino acid sequences of the second binding domain are according to the Exemplary numbering system.

[0010] In some embodiments of the trispecific antibody provided herein, the third binding domain binds to CD28 that is present on the surface of a T cell.

[0011] In some embodiments of the trispecific antibody provided herein, the third binding domain that binds to CD28 comprises: (i) a VH comprising a VH CDR1, a VH CDR2, and a VH CDR3 having an amino acid sequence of a VH CDR1, VH CDR2, and VH CDR3, respectively, of SEQ ID NO:690; and (ii) a VL comprising a VL CDR1, a VL CDR2, and a VL CDR3 having an amino acid sequence of a VL CDR1, VL CDR2, and VL CDR3, respectively, of SEQ ID NO:696. In some embodiments, the third binding domain that binds to CD28 comprises: (i) a VH comprising a VH CDR1, a VH CDR2, and a VH CDR3 having an amino acid sequence of a VH CDR1, VH CDR2, and VH CDR3, respectively, of SEQ ID NO:691; and (ii) a VL comprising a VL CDR1, a VL CDR2, and a VL CDR3 having an amino acid sequence of a VL CDR1, VL CDR2, and VL CDR3, respectively, of SEQ ID NO:697. In some embodiments, the third binding domain that binds to CD28 comprises: (i) a VH comprising a VH CDR1, a VH CDR2, and a VH CDR3 having an amino acid sequence of a VH CDR1, VH CDR2, and VH CDR3, respectively, of SEQ ID NO:692; and (ii) a VL comprising a VL CDR1, a VL CDR2, and a VL CDR3 having an amino acid sequence of a VL CDR1, VL CDR2, and VL CDR3, respectively, of SEQ ID NO:698. In some embodiments, the third binding domain that binds to CD28 comprises: (i) a VH comprising a VH CDR1, a VH CDR2, and a VH CDR3 having an amino acid sequence of a VH CDR1, VH CDR2, and VH CDR3, respectively, of SEQ ID NO:693; and (ii) a VL comprising a VL CDR1, a VL CDR2, and a VL CDR3 having an amino acid sequence of a VL CDR1, VL CDR2, and VL CDR3, respectively, of SEQ ID NO:699. In some embodiments, the VH CDR1, VH CDR2, VH CDR3, VL CDR1, VL CDR2, and VL CDR3 amino acid sequences of the third binding domain are according to the Kabat numbering system. In some embodiments, the VH CDR1, VH CDR2, VH CDR3, VL CDR1, VL CDR2, and VL CDR3 amino acid sequences of the third binding domain are according to the Chothia numbering system. In some embodiments, the VH CDR1, VH CDR2, VH CDR3, VL CDR1, VL CDR2, and VL CDR3 amino acid sequences of the third binding domain are according to the AbM numbering system. In some embodiments, the VH CDR1, VH CDR2, VH CDR3, VL CDR1, VL CDR2, and VL CDR3 amino acid sequences of the third binding domain are according to the Contact numbering system. In some embodiments, the VH CDR1, VH CDR2, VH CDR3, VL CDR1, VL CDR2, and VL CDR3 amino acid sequences of the third binding domain are according to the IMGT numbering system. In some embodiments, the VH CDR1, VH CDR2, VH CDR3, VL CDR1, VL CDR2, and VL CDR3 amino acid sequences of the third binding domain are according to the Exemplary numbering system.

[0012] In some embodiments of the trispecific antibody provided herein, the first binding domain is humanized. In some embodiments, the second binding domain is humanized. In some embodiments, the third binding domain is humanized. In some embodiments, the first binding domain and second binding domain are humanized. In some embodiments, the first binding domain and third binding domain are humanized. In some embodiments, the second binding domain and third binding domain are humanized. In some embodiments, the first binding domain, the second binding domain and the third binding domain are humanized.

[0013] In some embodiments of the trispecific antibody provided herein, the trispecific antibody is an IgG antibody. In some embodiments, the IgG antibody is an IgG1, IgG2, IgG3, or IgG4 antibody. In some embodiments, the IgG antibody is an IgG1 antibody. In some embodiments, the IgG antibody is an IgG2 antibody. In some embodiments, the IgG antibody is an IgG3 antibody. In some embodiments, the IgG antibody is an IgG4 antibody. In some embodiments, the antibody comprises a kappa light chain. In some embodiments, the antibody comprises a lambda light chain.

[0014] In some embodiments of the trispecific antibody provided herein, the first binding domain binds a Vβ17 antigen. In some embodiments, the first binding domain binds a Vβ17 epitope. In some embodiments, the VH CDR1, VH CDR2, VH CDR3, VL CDR1, VL CDR2 and VL CDR3 form a binding site for an antigen of the Vβ17. In some embodiments, the VH CDR1, VH CDR2, VH CDR3, VL CDR1, VL CDR2 and VL CDR3 form a binding site for an epitope of the Vβ17. In some embodiments, the first binding domain specifically binds to Vβ17.

[0015] In some embodiments of the trispecific antibody provided herein, the second binding domain binds an antigen of BCMA. In some embodiments, the second binding domain binds an epitope of BCMA. In some embodiments, the VH CDR1, VH CDR2, VH CDR3, VL CDR1, VL CDR2 and VL CDR3 form a binding site for an antigen of BCMA. In some embodiments, the VH CDR1, VH CDR2, VH CDR3, VL CDR1, VL CDR2 and VL CDR3 form a binding site for an epitope of BCMA. In some embodiments, the second binding domain specifically binds to BCMA.

[0016] In some embodiments of the trispecific antibody provided herein, second binding domain binds an antigen of PSMA. In some embodiments, the second binding domain binds an epitope of PSMA. In some embodiments, the VH CDR1, VH CDR2, VH CDR3, VL CDR1, VL CDR2 and VL CDR3 form a binding site for an antigen of PSMA. In some embodiments, the VH CDR1, VH CDR2, VH CDR3, VL CDR1, VL CDR2 and VL CDR3 form a binding site for an epitope of PSMA. In some embodiments, the second binding domain specifically binds to PSMA.

[0017] In some embodiments of the trispecific antibody provided herein, third binding domain binds an antigen of CD28. In some embodiments, the third binding domain binds an epitope of CD28. In some embodiments, the VH CDR1, VH CDR2, VH CDR3, VL CDR1, VL CDR2 and VL CDR3 form a binding site for an antigen of CD28. In some embodiments, the VH CDR1, VH CDR2, VH CDR3, VL CDR1, VL CDR2 and VL CDR3 form a binding site for an epitope of CD28. In some embodiments, the third binding domain specifically binds to CD28.

[0018] In some embodiments of the trispecific antibody provided herein, the trispecific antibody is multivalent.

[0019] In another aspect, provided is a trispecific antibody comprising: a first means capable of binding Vβ17 on the surface of a T cell; a second means capable of binding a cancer antigen on the surface of a cancer cell; and a third means capable of binding CD28 on the surface of the T cell. In some embodiments, the cancer antigen is BCMA and the cancer cell is a B cell cancer cell. In some embodiments, the cancer antigen is PSMA and the cancer cell is a prostate cancer cell.

[0020] In another aspect, provided is a nucleic acid encoding a trispecific antibody provided herein. In another aspect, provided is a vector comprising a nucleic acid encoding a trispecific antibody provided herein. In another aspect, provided is a host cell comprising a vector comprising a nucleic acid encoding a trispecific antibody provided herein.

[0021] In another aspect, provided is a kit comprising a vector comprising a nucleic acid encoding a trispecific antibody provided herein. In another aspect, provided is a kit comprising a trispecific antibody provided herein and packaging for the same.

[0022] In one aspect, provided is a pharmaceutical composition comprising a trispecific antibody provided herein, and a pharmaceutically acceptable carrier. In another aspect, provided is a method of producing a pharmaceutical composition comprising a trispecific antibody provided herein, comprising combining the trispecific antibody with a pharmaceutically acceptable carrier to obtain the pharmaceutical composition.

[0023] In another aspect, provided is a method of activating a T cell expressing Vβ17, comprising contacting the T cell with the trispecific antibody provided herein.

[0024] In another aspect, provided is a process for making an antibody that binds to more than one target molecule, the process comprising: a step for performing a function of obtaining a first binding domain capable of binding to Vβ17 on a T cell; a step for performing a function of obtaining a second binding domain capable of binding to cancer antigen on a cancer cell; a step for performing a function of obtaining a third binding domain capable of binding to CD28 on a T cell; and a step for performing a function of providing an antibody capable of binding to a Vβ17 antigen on the T cell, a cancer antigen on the cancer cell and the CD28 antigen on the T cell. In some embodiments of the process, (i) the step for performing a function of obtaining a second binding domain that binds to the cancer antigen on the cancer cell is repeated n times, and further comprising n steps for performing a function of providing a first binding domain that binds to Vβ17 present on a T cell and n number of target molecules, wherein n is at least 2, or (ii) the step for performing a function of obtaining a third binding domain that binds to the CD28 on the T cell is repeated n times, and further comprising n steps for performing a function of providing a first binding domain that binds to Vβ17 present on a T cell and n number of target molecules, wherein n is at least 2.

[0025] In another aspect, provided is a method of directing a T cell expressing Vβ17 and CD28 to a B cell, the method comprising contacting the T cell with a trispecific antibody provided herein, wherein the contacting directs the T cell to the B cell. In another aspect, provides is a method of inhibiting growth or proliferation of B cells expressing BCMA on the cell surface, the method comprising contacting the B cells with a trispecific antibody provided herein, wherein contacting the B cells with the pharmaceutical composition or the antibody or the trispecific antibody inhibits growth or proliferation of the B cells. In some embodiments, the B cells are in the presence of a T cell expressing Vβ17 while in contact with the trispecific antibody. In some embodiments, the B cells are in the presence of a T cell expressing CD28 while in contact with the trispecific antibody.

[0026] In another aspect, provided is a method of directing a T cell expressing Vβ17 to a cancer cell, the method comprising contacting the T cell with a trispecific antibody provided herein, wherein the contacting directs the T cell to the cancer cell.

[0027] In another aspect, provided is a method of inhibiting the growth of a cancer cell, comprising contacting a trispecific antibody provided herein with the cancer cell having the cancer antigen present on the surface of the cancer cell, wherein the contacting is in the presence of a T cell expressing the Vβ17, and wherein the contacting results in the inhibition of the growth of the cancer cell. In another aspect, provided is a method of inhibiting the proliferation of a cancer cell, comprising contacting a trispecific antibody provided herein with the cancer cell having the cancer antigen present on the surface of the cancer cell, wherein the contacting is in the presence of a T cell expressing the Vβ17, and wherein the contacting results in the inhibition of the proliferation of the cancer cell.

[0028] In another aspect, provided is a method of eliminating a cancer cell in a subject, comprising contacting a trispecific antibody provided herein with the cancer cell having the cancer antigen present on the surface of the cancer cell, wherein the contacting is in the presence of a T cell expressing the Vβ17, and wherein the contacting results in the elimination of the cancer cell. In another aspect, provided is a method of treating a disease in a subject, comprising administering an effective amount of a trispecific antibody provided herein to the subject, wherein the disease is caused all or in part by a cancer cell having the cancer antigen present on the surface of the cancer cell. In some embodiments, the subject is a human. In some embodiments, the subject is a subject in need thereof.

[0029] In some embodiments, the cancer antigen is present on the surface of a cancer cell.

[0030] In some embodiments, the cancer cell is a cell of an adrenal cancer, anal cancer, appendix cancer, bile duct cancer, bladder cancer, bone cancer, brain cancer, breast cancer, cervical cancer, colorectal cancer, esophageal cancer, gallbladder cancer, gestational trophoblastic, head and neck cancer, Hodgkin lymphoma, intestinal cancer, kidney cancer, leukemia, liver cancer, lung cancer, melanoma, mesothelioma, multiple myeloma, neuroendocrine tumor, non-Hodgkin lymphoma, oral cancer, ovarian cancer, pancreatic cancer, prostate cancer, sinus cancer, skin cancer, soft tissue sarcoma spinal cancer, stomach cancer, testicular cancer, throat cancer, thyroid cancer, uterine cancer endometrial cancer, vaginal cancer, or vulvar cancer. In some embodiments, the cancer antigen is an angiopoietin, BCMA, CD19, CD20, CD22, CD25 (IL2-R), CD30, CD33, CD37, CD38, CD52, CD56, CD123 (IL-3R), cMET, DLL/Notch, EGFR, EpCAM, FGF, FGF-R, GD2, HER2, Mesothelin, Nectin-4, PAP, PDGFRα, PSA, PSA3, PSMA, RANKL, SLAMF7, STEAPI, TARP, TROP2, VEGF, or VEGF-R antigen. In some embodiments, the cancer antigen is a CEA, immature laminin receptor, TAG-72, HPV E6, HPV E7, BING-4, calcium-activated chloride channel 2, cyclin-B1, 9D7, EpCAM, EphA3, Her2/neu, telomerase, mesothelin, SAP-1, surviving, a BAGE family antigen, CAGE family antigen, GAGE family antigen, MAGE family antigen, SAGE family antigen, XAGE family antigen, NY-ESO-1/LAGE-1, PRAME, SSX-2, Melan-A, MART-1, Gp100, pmel17, tyrosinase, TRP-1, TRP-2, P. polypeptide, MC1R, prostate-specific antigen, β-catenin, or BRCA1 antigen.

[0031] In some embodiments, (i) the adrenal cancer is an adrenocortical carcinoma (ACC), adrenal cortex cancer, pheochromocytoma, or neuroblastoma; (ii) the anal cancer is a squamous cell carcinoma, cloacogenic carcinoma, adenocarcinoma, basal cell carcinoma, or melanoma; (iii) the appendix cancer is a neuroendocrine tumor (NET), mucinous adenocarcinoma, goblet cell carcinoid, intestinal-type adenocarcinoma, or signet-ring cell adenocarcinoma; (iv) the bile duct cancer is an extrahepatic bile duct cancer, adenocarcinomas, hilar bile duct cancer, perihilar bile duct cancer, distal bile duct cancer, or intrahepatic bile duct cancer; (v) the bladder cancer is transitional cell carcinoma (TCC), papillary carcinoma, flat carcinoma, squamous cell carcinoma, adenocarcinoma, small-cell carcinoma, or sarcoma; (vi) the bone cancer is a primary bone cancer, sarcoma, osteosarcoma, chondrosarcoma, sarcoma, fibrosarcoma, malignant fibrous histiocytoma, giant cell tumor of bone, chordoma, or metastatic bone cancer; (vii) the brain cancer is an astrocytoma, brain stem glioma, glioblastoma, meningioma, ependymoma, oligodendroglioma, mixed glioma, pituitary carcinoma, pituitary adenoma, craniopharyngioma, germ cell tumor, pineal region tumor, medulloblastoma, or primary CNS lymphoma; (viii) the breast cancer is a breast adenocarcinoma, invasive breast cancer, noninvasive breast cancer, breast sarcoma, metaplastic carcinoma, adenocystic carcinoma, phyllodes tumor, angiosarcoma, HER2-positive breast cancer, triple-negative breast cancer, or inflammatory breast cancer; (ix) the cervical cancer is a squamous cell carcinoma, or adenocarcinoma; (x) the colorectal cancer is a colorectal adenocarcinoma, primary colorectal lymphoma, gastrointestinal stromal tumor, leiomyosarcoma, carcinoid tumor, mucinous adenocarcinoma, signet ring cell adenocarcinoma, gastrointestinal carcinoid tumor, or melanoma; (xi) the esophageal cancer is an adenocarcinoma or squamous cell carcinoma; (xii) the gall bladder cancer is an adenocarcinoma, papillary adenocarcinoma, adenosquamous carcinoma, squamous cell carcinoma, small cell carcinoma, or sarcoma; (xiii) the gestational trophoblastic disease (GTD) is a hydatidiform mole, gestational trophoblastic neoplasia (GTN), choriocarcinoma, placental-site trophoblastic tumor (PSTT), or epithelioid trophoblastic tumor (ETT); (xiv) the head and neck cancer is a laryngeal cancer, nasopharyngeal cancer, hypopharyngeal cancer, nasal cavity cancer, paranasal sinus cancer, salivary gland cancer, oral cancer, oropharyngeal cancer, or tonsil cancer; (xv) the Hodgkin lymphoma is a classical Hodgkin lymphoma, nodular sclerosis, mixed cellularity, lymphocyte-rich, lymphocyte-depleted, or nodular lymphocyte-predominant Hodgkin lymphoma (NLPHL); (xvi) the intestinal cancer is a small intestine cancer, small bowel cancer, adenocarcinoma, sarcoma, gastrointestinal stromal tumors, carcinoid tumors, or lymphoma; (xvii) the kidney cancer is a renal cell carcinoma (RCC), clear cell RCC, papillary RCC, chromophobe RCC, collecting duct RCC, unclassified RCC, transitional cell carcinoma, urothelial cancer, renal pelvis carcinoma, or renal sarcoma; (xviii) the leukemia is an acute lymphocytic leukemia (ALL), acute myeloid leukemia (AML), chronic lymphocytic leukemia (CLL), chronic myeloid leukemia (CML), hairy cell leukemia (HCL), or a myelodysplastic syndrome (MDS); (xix) the liver cancer is a hepatocellular carcinoma (HCC), fibrolamellar HCC, cholangiocarcinoma, angiosarcoma, or liver metastasis; (xx) the lung cancer is a small cell lung cancer, small cell carcinoma, combined small cell carcinoma, non-small cell lung cancer, lung adenocarcinoma, squamous cell lung cancer, large-cell undifferentiated carcinoma, pulmonary nodule, metastatic lung cancer, adenosquamous carcinoma, large cell neuroendocrine carcinoma, salivary gland-type lung carcinoma, lung carcinoid, mesothelioma, sarcomatoid carcinoma of the lung, or malignant granular cell lung tumor; (xxi) the melanoma is a superficial spreading melanoma, nodular melanoma, acral-lentiginous melanoma, lentigo maligna melanoma, amelanotic melanoma, desmoplastic melanoma, ocular melanoma, or metastatic melanoma; (xxii) the mesothelioma is a pleural mesothelioma, peritoneal mesothelioma, pericardial mesothelioma, or testicular mesothelioma; (xxiii) the multiple myeloma is an active myeloma or smoldering myeloma; (xxiv) the neuroendocrine tumor, is a gastrointestinal neuroendocrine tumor, pancreatic neuroendocrine tumor, or lung neuroendocrine tumor; (xxv) the non-Hodgkin's lymphoma is an anaplastic large-cell lymphoma, lymphoblastic lymphoma, peripheral T cell lymphoma, follicular lymphoma, cutaneous T cell lymphoma, lymphoplasmacytic lymphoma, marginal zone B-cell lymphoma, MALT lymphoma, small-cell lymphocytic lymphoma, Burkitt lymphoma, chronic lymphocytic leukemia (CLL), small lymphocytic lymphoma (SLL), precursor T-lymphoblastic leukemia/lymphoma, acute lymphocytic leukemia (ALL), adult T cell lymphoma/leukemia (ATLL), hairy cell leukemia, B-cell lymphomas, diffuse large B-cell lymphoma (DLBCL), primary mediastinal B-cell lymphoma, primary central nervous system (CNS) lymphoma, mantle cell lymphoma (MCL), marginal zone lymphomas, mucosa-associated lymphoid tissue (MALT) lymphoma, nodal marginal zone B-cell lymphoma, splenic marginal zone B-cell lymphoma, lymphoplasmacytic lymphoma, B-cell non-Hodgkin lymphoma, T cell non-Hodgkin lymphoma, natural killer cell lymphoma, cutaneous T cell lymphoma, Alibert-Bazin syndrome, Sezary syndrome, primary cutaneous anaplastic large-cell lymphoma, peripheral T cell lymphoma, angioimmunoblastic T cell lymphoma (AITL), anaplastic large-cell lymphoma (ALCL), systemic ALCL, enteropathy-type T cell lymphoma (EATL), or hepatosplenic gamma/delta T cell lymphoma; (xxvi) the oral cancer is a squamous cell carcinoma, verrucous carcinoma, minor salivary gland carcinomas, lymphoma, benign oral cavity tumor, eosinophilic granuloma, fibroma, granular cell tumor, karatoacanthoma, leiomyoma, osteochondroma, lipoma, schwannoma, neurofibroma, papilloma, condyloma acuminatum, verruciform xanthoma, pyogenic granuloma, rhabdomyoma, odontogenic tumors, leukoplakia, erythroplakia, squamous cell lip cancer, basal cell lip cancer, mouth cancer, gum cancer, or tongue cancer; (xxvii) the ovarian cancer is a ovarian epithelial cancer, mucinous epithelial ovarian cancer, endometrioid epithelial ovarian cancer, clear cell epithelial ovarian cancer, undifferentiated epithelial ovarian cancer, ovarian low malignant potential tumors, primary peritoneal carcinoma, fallopian tube cancer, germ cell tumors, teratoma, dysgerminoma ovarian germ cell cancer, endodermal sinus tumor, sex cord-stromal tumors, sex cord-gonadal stromal tumor, ovarian stromal tumor, granulosa cell tumor, granulosa-theca tumor, Sertoli-Leydig tumor, ovarian sarcoma, ovarian carcinosarcoma, ovarian adenosarcoma, ovarian leiomyosarcoma, ovarian fibrosarcoma, Krukenberg tumor, or ovarian cyst; (xxviii) the pancreatic cancer is a pancreatic exocrine gland cancer, pancreatic endocrine gland cancer, or pancreatic adenocarcinoma, islet cell tumor, or neuroendocrine tumor; (xxix) the prostate cancer is a prostate adenocarcinoma, prostate sarcoma, transitional cell carcinoma, small cell carcinoma, or neuroendocrine tumor; (xxx) the sinus cancer is a squamous cell carcinoma, mucosa cell carcinoma, adenoid cystic cell carcinoma, acinic cell carcinoma, sinonasal undifferentiated carcinoma, nasal cavity cancer, paranasal sinus cancer, maxillary sinus cancer, ethmoid sinus cancer, or nasopharynx cancer; (xxxi) the skin cancer is a basal cell carcinoma, squamous cell carcinoma, melanoma, Merkel cell carcinoma, Kaposi sarcoma (KS), actinic keratosis, skin lymphoma, or keratoacanthoma; (xxxii) the soft tissue cancer is an angiosarcoma, dermatofibrosarcoma, epithelioid sarcoma, Ewing's sarcoma, fibrosarcoma, gastrointestinal stromal tumors (GISTs), Kaposi sarcoma, leiomyosarcoma, liposarcoma, dedifferentiated liposarcoma (DL), myxoid/round cell liposarcoma (MRCL), well-differentiated liposarcoma (WDL), malignant fibrous histiocytoma, neurofibrosarcoma, rhabdomyosarcoma (RMS), or synovial sarcoma; (xxxiii) the spinal cancer is a spinal metastatic tumor; (xxxiv) the stomach cancer is a stomach adenocarcinoma, stomach lymphoma, gastrointestinal stromal tumors, carcinoid tumor, gastric carcinoid tumors, Type I ECL-cell carcinoid, Type II ECL-cell carcinoid, or Type III ECL-cell carcinoid; (xxxv) the testicular cancer is a seminoma, non-seminoma, embryonal carcinoma, yolk sac carcinoma, choriocarcinoma, teratoma, gonadal stromal tumor, leydig cell tumor, or sertoli cell tumor; (xxxiv) the throat cancer is a squamous cell carcinoma, adenocarcinoma, sarcoma, laryngeal cancer, pharyngeal cancer, nasopharynx cancer, oropharynx cancer, hypopharynx cancer, laryngeal cancer, laryngeal squamous cell carcinoma, laryngeal adenocarcinoma, lymphoepithelioma, spindle cell carcinoma, verrucous cancer, undifferentiated carcinoma, or lymph node cancer; (xxxv) the thyroid cancer is a papillary carcinoma, follicular carcinoma, Hürthle cell carcinoma, medullary thyroid carcinoma, or anaplastic carcinoma; (xxxvi) the uterine cancer is an endometrial cancer, endometrial adenocarcinoma, endometroid carcinoma, serous adenocarcinoma, adenosquamous carcinoma, uterine carcinosarcoma, uterine sarcoma, uterine leiomyosarcoma, endometrial stromal sarcoma, or undifferentiated sarcoma; (xxxvii) the vaginal cancer is a squamous cell carcinoma, adenocarcinoma, melanoma, or sarcoma; or (xxxviii) the vulvar cancer is a squamous cell carcinoma or adenocarcinoma.

[0032] In some embodiments, wherein the cancer antigen is BCMA. In some embodiments, the cancer cell is a B cell. In some embodiments, the cancer is a lymphoma. In some embodiments, the cancer is a leukemia.

[0033] In some embodiments, the cancer antigen is PSMA. In some embodiments, the cancer cell is a prostate cancer cell. In some embodiments, the cancer is a prostate cancer.

[0034] In another aspect, provided herein is a trispecific antibody comprising a first binding domain that binds to Vβ17, a second binding domain that binds to BCMA, and a third binding domain that binds to CD28.

[0035] In some embodiments, the first binding domain of the trispecific antibody comprises a VH comprising a VH CDR1 having an amino acid sequence of SEQ ID NO:48, a VH CDR2 having an amino acid sequence of SEQ ID NO:49, and a VH CDR3 having an amino acid sequence of SEQ ID NO:50; and a VL comprising a VL CDR1 having an amino acid sequence of SEQ ID NO:51, a VL CDR2 having an amino acid sequence of SEQ ID NO:52, and a VL CDR3 having an amino acid sequence of SEQ ID NO:53. In some embodiments, the first binding domain of the trispecific antibody comprises a VH having an amino acid sequence of SEQ ID NO:77; a VL having an amino acid sequence of SEQ ID NO:78; or a VH having an amino acid sequence of SEQ ID NO:77, and a VL having an amino acid sequence of SEQ ID NO:78.

[0036] In some embodiments, the first binding domain of the trispecific antibody comprises a VH comprising a VH CDR1 having an amino acid sequence of SEQ ID NO:48, a VH CDR2 having an amino acid sequence of SEQ ID NO:54, and a VH CDR3 having an amino acid sequence of SEQ ID NO:55; and a VL comprising a VL CDR1 having an amino acid sequence of SEQ ID NO:56, a VL CDR2 having an amino acid sequence of SEQ ID NO:57, and a VL CDR3 having an amino acid sequence of SEQ ID NO:58. In some embodiments, the first binding domain of the trispecific antibody comprises a VH having an amino acid sequence of SEQ ID NO:79; a VL having an amino acid sequence of SEQ ID NO:80; or a VH having an amino acid sequence of SEQ ID NO:79, and a VL having an amino acid sequence of SEQ ID NO:80.

[0037] In some embodiments, the first binding domain of the trispecific antibody comprises a VH comprising a VH CDR1 having an amino acid sequence of SEQ ID NO:59, a VH CDR2 having an amino acid sequence of SEQ ID NO:49, and a VH CDR3 having an amino acid sequence of SEQ ID NO:60; and a VL comprising a VL CDR1 having an amino acid sequence of SEQ ID NO:61, a VL CDR2 having an amino acid sequence of SEQ ID NO:62, and a VL CDR3 having an amino acid sequence of SEQ ID NO:63. In some embodiments, the first binding domain of the trispecific antibody comprises a VH having an amino acid sequence of SEQ ID NO:81; a VL having an amino acid sequence of SEQ ID NO:82; or a VH having an amino acid sequence of SEQ ID NO:81, and a VL having an amino acid sequence of SEQ ID NO:82.

[0038] In some embodiments, the first binding domain of the trispecific antibody comprises a VH comprising a VH CDR1 having an amino acid sequence of SEQ ID NO:64, a VH CDR2 having an amino acid sequence of SEQ ID NO:65, and a VH CDR3 having an amino acid sequence of SEQ ID NO:66; and a VL comprising a VL CDR1 having an amino acid sequence of SEQ ID NO:67, a VL CDR2 having an amino acid sequence of SEQ ID NO:68, and a VL CDR3 having an amino acid sequence of SEQ ID NO:69. In some embodiments, the first binding domain of the trispecific antibody comprises a VH having an amino acid sequence of SEQ ID NO:83; a VL having an amino acid sequence of SEQ ID NO:84; or a VH having an amino acid sequence of SEQ ID NO:83, and a VL having an amino acid sequence of SEQ ID NO:84.

[0039] In some embodiments the first binding domain of the trispecific antibody comprises a VH comprising a VH CDR1 having an amino acid sequence of SEQ ID NO:70, a VH CDR2 having an amino acid sequence of SEQ ID NO:49, and a VH CDR3 having an amino acid sequence of SEQ ID NO:71; and a VL comprising a VL CDR1 having an amino acid sequence of SEQ ID NO:61, a VL CDR2 having an amino acid sequence of SEQ ID NO:72, and a VL CDR3 having an amino acid sequence of SEQ ID NO:73. In some embodiments, the first binding domain of the trispecific antibody comprises a VH having an amino acid sequence of SEQ ID NO:85; a VL having an amino acid sequence of SEQ ID NO:86; or a VH having an amino acid sequence of SEQ ID NO:85, and a VL having an amino acid sequence of SEQ ID NO:86.

[0040] In some embodiments, the first binding domain of the trispecific antibody comprises a VH comprising a VH CDR1 having an amino acid sequence of SEQ ID NO:48, a VH CDR2 having an amino acid sequence of SEQ ID NO:74, and a VH CDR3 having an amino acid sequence of SEQ ID NO:75; and a VL comprising a VL CDR1 having an amino acid sequence of SEQ ID NO:56, a VL CDR2 having an amino acid sequence of SEQ ID NO:57, and a VL CDR3 having an amino acid sequence of SEQ ID NO:76. In some embodiments, the first binding domain of the trispecific antibody comprises a VH having an amino acid sequence of SEQ ID NO:87; a VL having an amino acid sequence of SEQ ID NO:88; or a VH having an amino acid sequence of SEQ ID NO:87, and a VL having an amino acid sequence of SEQ ID NO:88.

[0041] In some embodiments, the first binding domain of the trispecific antibody comprises a VH comprising a VH CDR1 having an amino acid sequence of SEQ ID NO:1, a VH CDR2 having an amino acid sequence of SEQ ID NO:2, and a VH CDR3 having an amino acid sequence of SEQ ID NO:3; and a VL comprising a VL CDR1 having an amino acid sequence of SEQ ID NO:666, a VL CDR2 having an amino acid sequence of SEQ ID NO:5, and a VL CDR3 having an amino acid sequence of SEQ ID NO:6. In some embodiments, the first binding domain of the trispecific antibody comprises a VH having an amino acid sequence of SEQ ID NO:21; a VL having an amino acid sequence of SEQ ID NO:665; or a VH having an amino acid sequence of SEQ ID NO:21, and a VL having an amino acid sequence of SEQ ID NO:665.

[0042] In some embodiments of the trispecific antibody provided herein, the Vβ17 is present on the surface of a T cell.

[0043] In some embodiments, the cancer antigen is BCMA. In some embodiments, the second binding domain of the trispecific antibody comprises a VH comprising a VH CDR1 having an amino acid sequence of SEQ ID NO:89, a VH CDR2 having an amino acid sequence of SEQ ID NO:90, and a VH CDR3 having an amino acid sequence of SEQ ID NO:91; and a VL comprising a VL CDR1 having an amino acid sequence of SEQ ID NO:92, a VL CDR2 having an amino acid sequence of SEQ ID NO:93, and a VL CDR3 having an amino acid sequence of SEQ ID NO:94. In some embodiments, the second binding domain of the trispecific antibody comprises a VH having an amino acid sequence of SEQ ID NO:95; a VL having an amino acid sequence of SEQ ID NO:96; or a VH having an amino acid sequence of SEQ ID NO:95, and a VL having an amino acid sequence of SEQ ID NO:96. In other embodiments of the trispecific antibody provided herein, the BCMA is present on the surface of a cell. In some embodiments, the cell is a B cell. In some embodiments, the cell is a cancer cell.

[0044] In some embodiments, the cancer antigen is PSMA. In some embodiments, the second binding domain of the trispecific antibody comprises a VH comprising a VH CDR1 having an amino acid sequence of SEQ ID NO:1019, a VH CDR2 having an amino acid sequence of SEQ ID NO:1020, and a VH CDR3 having an amino acid sequence of SEQ ID NO:1021; and a VL comprising a VL CDR1 having an amino acid sequence of SEQ ID NO:1034, a VL CDR2 having an amino acid sequence of SEQ ID NO:1035, and a VL CDR3 having an amino acid sequence of SEQ ID NO:1036. In some embodiments, the second binding domain of the trispecific antibody comprises a VH having an amino acid sequence of SEQ ID NO:1046; a VL having an amino acid sequence of SEQ ID NO:1047; or a VH having an amino acid sequence of SEQ ID NO:1046, and a VL having an amino acid sequence of SEQ ID NO:1047. In other embodiments of the trispecific antibody provided herein, the PSMA is present on the surface of a cell. In some embodiments, the cell is a prostate cell. In some embodiments, the cell is a cancer cell.

[0045] In some embodiments, the third binding domain of the trispecific antibody comprises a VH comprising a VH CDR1 having an amino acid sequence of SEQ ID NO:702, a VH CDR2 having an amino acid sequence of SEQ ID NO:708, and a VH CDR3 having an amino acid sequence of SEQ ID NO:714; and a VL comprising a VL CDR1 having an amino acid sequence of SEQ ID NO:794, a VL CDR2 having an amino acid sequence of SEQ ID NO:800, and a VL CDR3 having an amino acid sequence of SEQ ID NO:806. In some embodiments, the third binding domain of the trispecific antibody comprises a VH having an amino acid sequence of SEQ ID NO:690; a VL having an amino acid sequence of SEQ ID NO:696; or a VH having an amino acid sequence of SEQ ID NO:690, and a VL having an amino acid sequence of SEQ ID NO:696.

[0046] In some embodiments, the third binding domain of the trispecific antibody comprises a VH comprising a VH CDR1 having an amino acid sequence of SEQ ID NO:703, a VH CDR2 having an amino acid sequence of SEQ ID NO:709, and a VH CDR3 having an amino acid sequence of SEQ ID NO:715; and a VL comprising a VL CDR1 having an amino acid sequence of SEQ ID NO:795, a VL CDR2 having an amino acid sequence of SEQ ID NO:801, and a VL CDR3 having an amino acid sequence of SEQ ID NO:807. In some embodiments, the third binding domain of the trispecific antibody comprises a VH having an amino acid sequence of SEQ ID NO:691; a VL having an amino acid sequence of SEQ ID NO:697; or a VH having an amino acid sequence of SEQ ID NO:691, and a VL having an amino acid sequence of SEQ ID NO:697.

[0047] In some embodiments, the third binding domain of the trispecific antibody comprises a VH comprising a VH CDR1 having an amino acid sequence of SEQ ID NO:704, a VH CDR2 having an amino acid sequence of SEQ ID NO:710, and a VH CDR3 having an amino acid sequence of SEQ ID NO:716; and a VL comprising a VL CDR1 having an amino acid sequence of SEQ ID NO:796, a VL CDR2 having an amino acid sequence of SEQ ID NO:802, and a VL CDR3 having an amino acid sequence of SEQ ID NO:808. In some embodiments, the third binding domain of the trispecific antibody comprises a VH having an amino acid sequence of SEQ ID NO:692; a VL having an amino acid sequence of SEQ ID NO:698; or a VH having an amino acid sequence of SEQ ID NO:692, and a VL having an amino acid sequence of SEQ ID NO:698.

[0048] In some embodiments, the third binding domain of the trispecific antibody comprises a VH comprising a VH CDR1 having an amino acid sequence of SEQ ID NO:705, a VH CDR2 having an amino acid sequence of SEQ ID NO:711, and a VH CDR3 having an amino acid sequence of SEQ ID NO:717; and a VL comprising a VL CDR1 having an amino acid sequence of SEQ ID NO:797, a VL CDR2 having an amino acid sequence of SEQ ID NO:803, and a VL CDR3 having an amino acid sequence of SEQ ID NO:809. In some embodiments, the third binding domain of the trispecific antibody comprises a VH having an amino acid sequence of SEQ ID NO:693; a VL having an amino acid sequence of SEQ ID NO:699; or a VH having an amino acid sequence of SEQ ID NO:693, and a VL having an amino acid sequence of SEQ ID NO:699.

[0049] In some embodiments of the trispecific antibody provided herein, CD28 is present on the surface of a T cell. In some embodiments of the trispecific antibody provided herein, CD28 is present on the surface of a B cell.

[0050] Any combination of first binding domain, second binding domain, and third binding domain provided herein is contemplated for the trispecific antibodies.

[0051] In some embodiments, the trispecific antibody first binding domain is humanized, the second binding domain is humanized, the third binding domain is humanized, the first binding domain and second binding domain are humanized, the first binding domain and third binding domain are humanized, the second binding domain and third binding domain are humanized or all three binding domains are humanized. In some embodiments, the trispecific antibody is an IgG antibody. In some embodiments, the trispecific antibody is an IgG1, IgG2, IgG3, or IgG4 antibody.

[0052] In some embodiments of the trispecific antibody provided herein, first binding domain binds a Vβ17 antigen. In some embodiments of the trispecific antibody provided herein, the first binding domain binds a Vβ17 epitope. In some embodiments of the trispecific antibody provided herein, VH CDR1, VH CDR2, VH CDR3, VL CDR1, VL CDR2 and VL CDR3 form a binding site for an antigen of the Vβ17. In some embodiments of the trispecific antibody provided herein, VH CDR1, VH CDR2, VH CDR3, VL CDR1, VL CDR2 and VL CDR3 form a binding site for an epitope of the Vβ17.

[0053] In some embodiments of the trispecific antibody provided herein, the second binding domain binds an antigen of BCMA. In some embodiments of the trispecific antibody provided herein, the second binding domain binds an epitope of BCMA. In some embodiments of the trispecific antibody provided herein, the VH CDR1, VH CDR2, VH CDR3, VL CDR1, VL CDR2 and VL CDR3 form a binding site for an antigen of BCMA. In some embodiments of the trispecific antibody provided herein, the VH CDR1, VH CDR2, VH CDR3, VL CDR1, VL CDR2 and VL CDR3 form a binding site for an epitope of BCMA.

[0054] In some embodiments of the trispecific antibody provided herein, the second binding domain binds an antigen of PSMA. In some embodiments of the trispecific antibody provided herein, the second binding domain binds an epitope of PSMA. In some embodiments of the trispecific antibody provided herein, the VH CDR1, VH CDR2, VH CDR3, VL CDR1, VL CDR2 and VL CDR3 form a binding site for an antigen of PSMA. In some embodiments of the trispecific antibody provided herein, the VH CDR1, VH CDR2, VH CDR3, VL CDR1, VL CDR2 and VL CDR3 form a binding site for an epitope of PSMA.

[0055] In some embodiments of the trispecific antibody provided herein, the third binding domain binds an antigen of CD28. In some embodiments of the trispecific antibody provided herein, the third binding domain binds an epitope of CD28. In some embodiments of the trispecific antibody provided herein, the VH CDR1, VH CDR2, VH CDR3, VL CDR1, VL CDR2 and VL CDR3 form a binding site for an antigen of CD28. In embodiments of the trispecific antibody provided herein, the VH CDR1, VH CDR2, VH CDR3, VL CDR1, VL CDR2 and VL CDR3 form a binding site for an epitope of CD28.

[0056] In some embodiments of the trispecific antibody provided herein, the B cell is killed when the trispecific antibody binds to the Vβ17 on the surface of the T cell, CD28 on the surface of the T cell, and BCMA on the surface of the B cell. In some embodiments of the trispecific antibody provided herein, the B cell is killed when the trispecific antibody binds to the Vβ17 on the surface of the T cell, CD28 on the surface of the T cell, and BCMA on the surface of the B cell. In certain embodiments, the B cell is a cancerous B cell.

[0057] In some embodiments of the trispecific antibody provided herein, the B cell is killed when the trispecific antibody binds to the Vβ17 on the surface of the T cell, CD28 on the surface of the T cell, and PSMA on the surface of the prostate cell. In some embodiments of the trispecific antibody provided herein, the prostate cell is killed when the trispecific antibody binds to the Vβ17 on the surface of the T cell, CD28 on the surface of the T cell, and PSMA on the surface of the prostate cell. In certain embodiments, the prostate cell is a cancerous prostate cell. Other target cells expressing PSMA are also contemplated.

[0058] In some embodiments, the trispecific antibody induces T cell dependent cytotoxicity of the B cell in vitro with an EC₅₀ of less than about 500 pM. In some embodiments, the trispecific antibody induces T cell dependent cytotoxicity of the B cell in vitro with an EC₅₀ of less than about 300 pM. In some embodiments, the trispecific antibody induces T cell dependent cytotoxicity of the B cell in vitro with an EC₅₀ of less than about 160 pM. In some embodiments, the trispecific antibody EC₅₀ is assessed with a mixture of effector T cells and target B cells. In some embodiments of the trispecific antibody provided herein, the effector cell to target cell ratio is about 0.01 to 1 to about 10 to 1. In some embodiments of the trispecific antibody provided herein, the effector cell to target cell ratio is about 0.1 to 1 to about 5 to 1. In some embodiments of the trispecific antibody provided herein, the effector cell to target cell ratio is about 1:1.

[0059] In some embodiments of the trispecific antibody provided herein, the T cell releases cytokines when the trispecific antibody binds to CD28 on the surface of the T cell. In some embodiments of the trispecific antibody provided herein, the cytokine is a chemokine, interferon, interleukin, or a protein belonging to the tumour necrosis factor superfamily. In some embodiments of the trispecific antibody provided herein, the chemokine is a CC chemokine, CXC chemokine, C chemokine or a CX3C chemokine. In some embodiments of the trispecific antibody provided herein, the interferon is a Type I interferon, Type 2 interferon or a Type 3 interferon. In some embodiments of the trispecific antibody provided herein, the interleukin is an IL-1, IL-2, IL-3, IL-4, IL-5, IL-6, IL-7, IL-8, IL-9, IL-10, IL-11, IL-12, IL-13, IL-15 or an IL-17. In some embodiments of the trispecific antibody provided herein, the protein belonging to the tumour necrosis factor superfamily is lymphotoxin alpha, tumor necrosis factor, lymphotoxin beta, OX40 ligand, CD40 ligand, Fas ligand, CD27 ligand, CD30 ligand, CD137 ligand, TNF-related apoptosis-inducing ligand, receptor activator of nuclear factor kappa-B ligand, TNF-related weak inducer of apoptosis, proliferation-inducing ligand, B-cell activating factor, LIGHT, vascular endothelial growth inhibitor, TNF superfamily member 18, or ectodysplasin A.

[0060] In some embodiments, the trispecific antibody is multivalent. In some embodiments, the trispecific antibody is capable of binding at least five antigens.

[0061] In one aspect, provided herein is a trispecific antibody comprising a first means capable of binding Vβ17 on the surface of the T cell; a second means capable of binding BCMA on the surface of the B cell; and a third means capable of binding CD28 on the surface of the T cell. In some embodiments of the trispecific antibody provided herein, the first means capable of binding Vβ17 binds a Vβ17 antigen. In some embodiments of the trispecific antibody provided herein, the first means capable of binding Vβ17 binds a Vβ17 epitope. In some embodiments of the trispecific antibody provided herein, the first means capable of binding BCMA binds a BCMA antigen. In some embodiments of the trispecific antibody provided herein, the first means capable of binding BCMA binds a BCMA epitope. In some embodiments of the trispecific antibody provided herein, the first means capable of binding CD28 binds a CD28 antigen. In some embodiments of the trispecific antibody provided herein, the first means capable of binding CD28 binds a CD28 epitope. In some embodiments of the trispecific antibody provided herein, the second means capable of binding BCMA binds a BCMA antigen. In some embodiments of the trispecific antibody provided herein, the second means capable of binding BCMA binds a BCMA epitope. In some embodiments of the trispecific antibody provided herein, the third means capable of binding CD28 binds a CD28 antigen. In some embodiments of the trispecific antibody provided herein, the third means capable of binding CD28 binds a CD28 epitope.

[0062] In one aspect, provided herein is a trispecific antibody comprising a first means capable of binding Vβ17 on the surface of the T cell; a second means capable of binding PSMA on the surface of the prostate cell; and a third means capable of binding CD28 on the surface of the T cell. In some embodiments of the trispecific antibody provided herein, the first means capable of binding Vβ17 binds a Vβ17 antigen. In some embodiments of the trispecific antibody provided herein, the first means capable of binding Vβ17 binds a Vβ17 epitope. In some embodiments of the trispecific antibody provided herein, the first means capable of binding PSMA binds a PSMA antigen. In some embodiments of the trispecific antibody provided herein, the first means capable of binding PSMA binds a PSMA epitope. In some embodiments of the trispecific antibody provided herein, the first means capable of binding CD28 binds a CD28 antigen. In some embodiments of the trispecific antibody provided herein, the first means capable of binding CD28 binds a CD28 epitope. In some embodiments of the trispecific antibody provided herein, the second means capable of binding PSMA binds a PSMA antigen. In some embodiments of the trispecific antibody provided herein, the second means capable of binding PSMA binds a PSMA epitope. In some embodiments of the trispecific antibody provided herein, the third means capable of binding CD28 binds a CD28 antigen. In some embodiments of the trispecific antibody provided herein, the third means capable of binding CD28 binds a CD28 epitope.

[0063] In one aspect, provided herein is a nucleic acid encoding the trispecific antibody. In one aspect, provided herein is a vector comprising the nucleic acid encoding the trispecific antibody. In one aspect, provided herein is a host cell comprising the vector comprising the nucleic acid encoding the trispecific antibody. In one aspect, provided herein is a kit comprising the vector comprising the nucleic acid encoding the trispecific antibody and packaging for the same. In one aspect, the packaging comprises a compartment for holding the vector.

[0064] In one aspect, provided herein is a pharmaceutical composition comprising the trispecific antibody and a pharmaceutically acceptable carrier. In one aspect, provided herein is a method of producing the pharmaceutical composition comprising combining the antibody with a pharmaceutically acceptable carrier to obtain the pharmaceutical composition.

[0065] In one aspect, provided herein is a method of directing a T cell expressing Vβ17 and CD28 to a target cell, the method comprising contacting the T cell with the trispecific antibody, wherein the contacting directs the T cell to the target cell. In one aspect, provided herein is a method of directing a T cell expressing Vβ17 to a target cell, the method comprising contacting the T cell with the trispecific antibody, wherein the contacting directs the T cell to the target cell.

[0066] In certain embodiments, the target cell is a cancer cell. In one embodiment, the target cell is a B cell. In one embodiment, the target cell is a cancerous B cell. In certain embodiments, the target cell expresses BCMA. In one embodiment, the target cell is a prostate cell. In one embodiment, the target cell is a prostate cancer cell. In certain embodiments, the target cell expresses PSMA.

[0067] In one aspect, provided herein is a method of inhibiting growth or proliferation of target cells expressing a cancer antigen on the cell surface, the method comprising contacting the target cells with the trispecific antibody, wherein contacting the target cells with the pharmaceutical composition or the antibody or the trispecific antibody inhibits growth or proliferation of the target cells. In one aspect, provided herein is a method of inhibiting growth or proliferation of target cells expressing a cancer antigen on the cell surface, the method comprising contacting the target cells with the trispecific antibody, wherein contacting the target cells with the pharmaceutical composition or the antibody or the trispecific antibody inhibits growth or proliferation of the target cells.

[0068] In some embodiments of the method provided herein, the target cells are in the presence of a T cell expressing Vβ17 while in contact with the trispecific antibody. In some embodiments of the method provided herein, the target cells are in the presence of a T cell expressing CD28 while in contact with the trispecific antibody.

[0069] In one aspect, provided herein is a method for eliminating target cells in a subject, comprising administering an effective amount of the trispecific antibody to the subject. In one aspect, provided herein is a method for eliminating target cells expressing a cancer antigen in a subject, comprising administering an effective amount of the trispecific antibody to the subject.

[0070] In one aspect, provided herein is a method treating a disease caused all or in part by target cells expressing a cancer antigen in a subject, comprising administering an effective amount of the trispecific antibody to the subject. In some embodiments of the method, the disease is cancer. In some embodiments, the cancer antigen is BCMA. In some embodiments of the method, the disease is a leukemia. In some embodiments of the method, the disease is a lymphoma. In some embodiments, the cancer antigen is PSMA. In some embodiments of the method, the disease is a prostate cancer. In one aspect, provided herein is a method treating a disease caused all or in part by target cells expressing CD28 in a subject, comprising administering an effective amount of the trispecific antibody provided herein to the subject. In some embodiments of the method, the subject has a cancer. In some embodiments of the method, the subject has a leukemia. In some embodiments of the method, the subject has a lymphoma. In some embodiments of the method, the subject has a prostate cancer. In some embodiments of the method, the subject is a subject in need thereof. In some embodiments of the method, the subject is a human.

[0071] In one aspect, provided herein is a trispecific antibody as defined herein for use in therapy.

[0072] In one aspect, provided herein is a trispecific antibody as defined herein for use in a method of treating cancer in a subject. In some embodiments, the cancer is a leukemia. In some embodiments of the method, the cancer is a lymphoma. In some embodiments of the method, the cancer is a prostate cancer. In one aspect, the use comprises administering an effective amount of the trispecific antibody to the subject.

[0073] In one aspect, provided herein is a process for making an antibody that binds to more than one target molecule, the process comprising a step for performing a function of obtaining a binding domain capable of binding to Vβ17 on an T cell; a step for performing a function of obtaining a binding domain capable of binding to a cancer antigen on a target cell; a step for performing a function of obtaining a binding domain capable of binding to CD28 on a target cell; and a step for performing a function of providing an antibody capable of binding to a Vβ17 (e.g., Vβ17 antigen) on a T cell, a cancer antigen (e.g., tumor associated antigen) on a target cell and a CD28 (e.g., CD28 antigen) on a target cell. In some embodiments of the process, the step for performing a function of obtaining a binding domain capable of binding to the cancer antigen is repeated n times and further comprising n steps for performing a function of providing a binding domain capable of binding to a Vβ17 on a T cell and a CD28 on a target cell and n number of target molecules, wherein n is at least 2. In some embodiments of the process, the step for performing a function of obtaining a binding domain capable of binding to CD28 is repeated n times and further comprising n steps for performing a function of providing a binding domain capable of binding to a Vβ17 on a T cell and a cancer antigen on a target cell and n number of target molecules, wherein n is at least 2. In some embodiments of the process, the binding domain capable of binding to Vβ17 binds a Vβ17 antigen. In some embodiments of the process, the binding domain capable of binding to Vβ17 binds a Vβ17 epitope. In some embodiments of the process, the binding domain capable of binding to a cancer antigen binds an epitope. In some embodiments of the process, the binding domain capable of binding to CD28 binds a CD28 antigen. In some embodiments of the process, the domain capable of binding to CD28 binds a CD28 epitope.

[0074] In one aspect, provided herein is a method of directing a T cell expressing Vβ17 and CD28 to a B cell, the method comprising contacting the T cell with the trispecific antibody, wherein the contacting directs the T cell to the B cell. In one aspect, provided herein is a method of directing a T cell expressing Vβ17 to a B cell, the method comprising contacting the T cell with the trispecific antibody, wherein the contacting directs the T cell to the B cell.

[0075] In one aspect, provided herein is a method of inhibiting growth or proliferation of B cells expressing BCMA on the cell surface, the method comprising contacting the B cells with the trispecific antibody, wherein contacting the B cells with the pharmaceutical composition or the antibody or the trispecific antibody inhibits growth or proliferation of the B cells. In one aspect, provided herein is a method of inhibiting growth or proliferation of B cells expressing CD28 on the cell surface, the method comprising contacting the B cells with the trispecific antibody, wherein contacting the B cells with the pharmaceutical composition or the antibody or the trispecific antibody inhibits growth or proliferation of the B cells.

[0076] In some embodiments of the method provided herein, the B cells are in the presence of a T cell expressing Vβ17 while in contact with the trispecific antibody. In some embodiments of the method provided herein, the B cells are in the presence of a T cell expressing CD28 while in contact with the trispecific antibody.

[0077] In one aspect, provided herein is a method for eliminating B cells expressing BCMA in a subject, comprising administering an effective amount of the trispecific antibody to the subject. In one aspect, provided herein is a method for eliminating B cells expressing CD28 in a subject, comprising administering an effective amount of the trispecific antibody to the subject.

[0078] In one aspect, provided herein is a method treating a disease caused all or in part by B cells expressing BCMA in a subject, comprising administering an effective amount of the trispecific antibody to the subject. In some embodiments of the method, the disease is cancer. In some embodiments of the method, the disease is a leukemia. In some embodiments of the method, the disease is a lymphoma. In one aspect, provided herein is a method treating a disease caused all or in part by B cells expressing CD28 in a subject, comprising administering an effective amount of the trispecific antibody to the subject. In some embodiments of the method, the disease is cancer. In some embodiments of the method, the disease is a leukemia. In some embodiments of the method, the disease is a lymphoma.

[0079] In some embodiments of the method, the subject has a cancer. In some embodiments of the method, the subject has a leukemia. In some embodiments of the method, the subject has a lymphoma. In some embodiments of the method, the subject is a subject in need thereof. In some embodiments of the method, the subject is a human.

[0080] In one aspect, provided herein is a trispecific antibody as defined herein for use in therapy.

[0081] In one aspect, provided herein is a trispecific antibody as defined herein for use in a method of treating cancer in a subject. In some embodiments, the cancer is a leukemia. In some embodiments of the method, the cancer is a lymphoma. In one aspect, the use comprises administering an effective amount of the trispecific antibody to the subject.

[0082] In one aspect, provided herein is a method of activating a T cell expressing Vβ17, comprising contacting the T cell with the trispecific antibody. In one aspect, provided herein is a method of activating a T cell expressing CD28, comprising contacting the T cell with the trispecific antibody. In some embodiments of the method, the contacting results in an increase in cytokine expression, as compared to a control T cell expressing CD28.

[0083] In one aspect, provided herein is a process for making an antibody that binds to more than one target molecule, the process comprising a step for performing a function of obtaining a binding domain capable of binding to Vβ17 on an T cell; a step for performing a function of obtaining a binding domain capable of binding to BCMA on a B cell; a step for performing a function of obtaining a binding domain capable of binding to CD28 on a T cell; and a step for performing a function of providing an antibody capable of binding to a Vβ17 (e.g., Vβ17 antigen) on a T cell, a BCMA (e.g., BCMA antigen) on a B cell and a CD28 (e.g., CD28 antigen) on a T cell. In some embodiments of the process, the step for performing a function of obtaining a binding domain capable of binding to BCMA is repeated n times and further comprising n steps for performing a function of providing a binding domain capable of binding to a Vβ17 on a T cell and a CD28 on a T cell and n number of target molecules, wherein n is at least 2. In some embodiments of the process, the step for performing a function of obtaining a binding domain capable of binding to CD28 is repeated n times and further comprising n steps for performing a function of providing a binding domain capable of binding to a Vβ17 on a T cell and a BCMA on a B cell and n number of target molecules, wherein n is at least 2. In some embodiments of the process, the binding domain capable of binding to Vβ17 binds a Vβ17 antigen. In some embodiments of the process, the binding domain capable of binding to Vβ17 binds a Vβ17 epitope. In some embodiments of the process, the binding domain capable of binding to BCMA binds a BCMA antigen. In some embodiments of the process, the binding domain capable of binding to BCMA binds a BCMA epitope. In some embodiments of the process, the binding domain capable of binding to CD28 binds a CD28 antigen. In some embodiments of the process, the domain capable of binding to CD28 binds a CD28 epitope.

[0084] In one aspect, provided herein is a process for making an antibody that binds to more than one target molecule, the process comprising a step for performing a function of obtaining a binding domain capable of binding to Vβ17 on an T cell; a step for performing a function of obtaining a binding domain capable of binding to BCMA on a B cell; a step for performing a function of obtaining a binding domain capable of binding to CD28 on a B cell; and a step for performing a function of providing an antibody capable of binding to a Vβ17 (e.g., Vβ17 antigen) on a T cell, a BCMA (e.g., BCMA antigen) on a B cell and a CD28 (e.g., CD28 antigen) on a B cell. In some embodiments of the process, the step for performing a function of obtaining a binding domain capable of binding to BCMA is repeated n times and further comprising n steps for performing a function of providing a binding domain capable of binding to a Vβ17 on a T cell and a CD28 on a B cell and n number of target molecules, wherein n is at least 2. In some embodiments of the process, the step for performing a function of obtaining a binding domain capable of binding to CD28 is repeated n times and further comprising n steps for performing a function of providing a binding domain capable of binding to a Vβ17 on a T cell and a BCMA on a B cell and n number of target molecules, wherein n is at least 2. In some embodiments of the process, the binding domain capable of binding to Vβ17 binds a Vβ17 antigen. In some embodiments of the process, the binding domain capable of binding to Vβ17 binds a Vβ17 epitope. In some embodiments of the process, the binding domain capable of binding to BCMA binds a BCMA antigen. In some embodiments of the process, the binding domain capable of binding to BCMA binds a BCMA epitope. In some embodiments of the process, the binding domain capable of binding to CD28 binds a CD28 antigen. In some embodiments of the process, the domain capable of binding to CD28 binds a CD28 epitope.

### BRIEF DESCRIPTION OF THE DRAWINGS

[0085] The foregoing summary, as well as the following detailed description of specific embodiments of the present application, will be better understood when read in conjunction with the appended drawings. It should be understood, however, that the application is not limited to the precise embodiments shown in the drawings.

[0086] FIG. 1 shows the binding of an anti-Vβ17/anti-BCMA/anti-CD28 trispecific antibody to recruit T-cells to a cancer cell and to induce cancer cell death.

[0087] FIG. 2 shows that anti-Vβ17/anti-BCMA/anti-CD28 trispecific antibodies show potent binding on Pan T cells. Antibodies with C28B19, C28B103 and C28B105 clones showed robust binding to Pan T cells in a dose dependent manner.

[0088] FIG. 3 shows that anti-Vβ17/anti-BCMA/anti-CD28 trispecific antibodies show potent binding on H929 cells using BCMA and CD28. Vβ17×CD28×BCMA trispecific antibodies showed potent binding to H929 cells in a CD28 and BCMA dependent manner.

[0089] FIGS. 4A-4C show engagement of CD28 potently enhances the activation of vβ17 t cells in plate bound agonism assay. FIG. 4A shows CD25 activation of Vβ17+ T cells at 96 hrs. FIG. 4B shows CD71 activation of Vβ17+ T cells at 96 hrs. FIG. 4C shows proliferation of Vβ17+ T cells at 96 hrs.

[0090] FIGS. 5A-5G show engagement of CD28 potently enhances the activation of Vβ17 T cells in the presence of H929 cells. FIGS. 5A-5B show activation of Vβ17 T cells by upregulation of CD25 in the presence of H929 cells at 96 hrs. FIGS. 5C-5D show activation of Vβ17 T cells by upregulation of CD71 in the presence of H929 cells at 96 hrs. FIGS. 5D-5F show activation of Vβ17 T cells by upregulation of CD71 in the presence of H929 cells at 96 hrs.

[0091] FIGS. 6A-6C show engagement of CD28 does not induce exhaustion of Vβ17 T cells. FIG. 6A shows LAG3 was induced only on a small fraction of the Vβ17 T cells and no upregulation was seen on the Vβ17− T cells. Overall, only 20% of the Vβ17 T cells were found to express LAG3. FIG. 6B shows PD1 to be upregulated on Vβ17+ T cells in the presence of both the Vβ17×BCMA antibodies and the Vβ17×CD28×BCMA antibodies. FIG. 6C shows TIM3 was induced only on a small fraction of the Vβ17 T cells and no upregulation was seen on the Vβ17− T cells. Overall, only 20% of the Vβ17 T cells were found to express TIM3 cells.

[0092] FIGS. 7A-7C show engagement of CD28 potently enhances the cytotoxicity induced by Vβ17 T cells. FIG. 7A shows cytotoxicity mediated by anti-Vβ17/anti-BCMA/anti-CD28 trispecific antibodies. FIG. 7B shows cytotoxicity mediated by anti-Vβ17/anti-BCMA/anti-CD28 trispecific antibodies. FIG. 7C shows cytotoxicity mediated by anti-Vβ17/anti-BCMA/anti-CD28 trispecific antibodies.

[0093] FIGS. 8A-8D show engagement of CD28 potently enhances the cytokine secretion. FIGS. 8A-8D show Vβ17×CD28×BCMA trispecific antibodies showed superior cytokine release in comparison to Vβ17×BCMA antibodies and Null×CD28×BCMA antibodies.

[0094] FIG. 9 shows expression of co-stimulatory ligands on BCMA expression in H929 cell lines. Both tested multiple myeloma cell lines, MM1.R and H929 were found to express CD28, while no expression of 4IBBL was observed on either of the cell lines.

[0095] FIG. 10 shows a glyph illustration of the following Vβ17×CD28×BCMA trispecific antibodies disclosed herein and their descriptions: VB28B35, VB28B36, VB28B38, VB28B39, and VB28B40.

[0096] FIG. 11 shows glyph illustration of the following Vβ17×CD28×BCMA trispecific antibodies disclosed herein and their descriptions: VB28B16, VB28B17, VB28B18, VB28B19, VB28B20, VB28B21, VB28B22, VB28B23, VB28B24, VB28B25, VB28B26, and VB28B27.

[0097] FIG. 12 shows Glyph illustration of the following Vβ17×CD28×PSMA trispecific antibodies disclosed herein and their descriptions: VB28B28, VB28B29, VB28B31, VB28B32, and VB28B33.

[0098] FIG. 13 shows Bcl-xL levels in Vβ17+ T cells upon stimulation with anti-Vβ17/anti-CD28/anti-BCMA trispecific antibodies. Anti-apoptotic protein BcL-xL is induced in Vβ17+ T cells with CD28 activation.

[0099] FIG. 14 shows activation profile of Vβ17− T cells with anti-Vβ17/anti-CD28 controls.

[0100] FIG. 15 shows cytokine release from anti-Vβ17/anti-CD28 controls. Cytokine secretion is enhanced with CD28 costimulation.

[0101] FIG. 16 shows activation profile of Vβ17− T cells with anti-Vβ17/anti-CD28 controls.

[0102] FIG. 17 shows cytokine release from anti-Vβ17/anti-CD28 controls. Cytokine secretion is enhanced with CD28 costimulation.

[0103] FIG. 18 shows the activation profile of Vβ17+ T cells with Vβ17/null or null/null controls. No activation of Vβ17+ T cells with Null arm controls.

[0104] FIG. 19 shows cytotoxicity with anti-Vβ17/anti-CD28/anti-BCMA antibodies and their controls. Depletion of Vβ17+ T cells results in complete loss of cytotoxicity induced by anti-Vβ17/anti-BCMA antibody. No cytotoxicity was observed with anti-CD28/null bispecific.

[0105] FIG. 20 shows cytotoxicity with anti-Vβ17/anti-CD28/anti-BCMA antibodies and their controls. Depletion of Vβ17+ T cells results in complete loss of cytotoxicity induced by anti-Vβ17/anti-BCMA antibody. No cytotoxicity was observed with anti-CD28/null bispecific.

[0106] FIG. 21 shows the activation profile of Vβ17+ T cells and Vβ17− T cells, with anti-Vβ17/anti-CD28/anti-BCMA antibodies in Donor 1. Combining CD28 costimulation with Vβ17 TCR stimulation potently enhances the activation of Vβ17+ T cells compared to Vβ17 TCR stimulation alone. Anti-Vβ17/anti-CD28/anti-BCMA antibody shows higher activation compared to anti-Vβ17/anti-BCMA antibody, there was no activation with anti-CD28/null bispecific antibody, and activation was observed with anti-CD28/anti-BCMA antibody.

[0107] FIG. 22 shows the activation profile of Vβ17+ T cells and Vβ17− T cells, with anti-Vβ17/anti-CD28/anti-BCMA antibodies in Donor 2. Combining CD28 costimulation with Vβ17 TCR stimulation potently enhances the activation of Vβ17+ T cells compared to Vβ17 TCR stimulation alone. Anti-Vβ17/anti-CD28/anti-BCMA antibody shows higher activation compared to anti-Vβ17/anti-BCMA antibody, there was no activation with anti-CD28/null bispecific antibody, and activation was observed with anti-CD28/anti-BCMA antibody.

[0108] FIG. 23 shows cytokine release in Pan T cells expressing or depleted of Vβ17 in Donor 1. Cytokine secretion is enhanced with CD28 costimulation in a Vβ17 T cell dependent manner.

[0109] FIG. 24 shows cytokine release in Pan T cells expressing or depleted of Vβ17 in Donor 2. Cytokine secretion is enhanced with CD28 costimulation in a Vβ17 T cell dependent manner.

[0110] FIG. 25 shows the activation profile of Vβ17+ T cells and Vβ17− T cells with anti-Vβ17/anti-CD28/anti-BCMA antibodies in Donor 1. Combining CD28 costimulation with Vβ17 TCR stimulation potently enhances the activation of Vβ17+ cells compared to Vβ17 TCR stimulation alone. Anti-Vβ17/anti-CD28/anti-BCMA antibody shows higher activation as compared to anti-Vβ17/anti-BCMA antibody. There was no activation observed with anti-CD28/null bispecific antibody but activation was observed with anti-CD28/anti-BCMA antibody.

[0111] FIG. 26 shows the activation profile of Vβ17+ T cells and Vβ17− T cells with anti-Vβ17/anti-CD28/anti-BCMA antibodies in Donor 1. Combining CD28 costimulation with Vβ17 TCR stimulation potently enhances the activation of Vβ17+ cells compared to Vβ17 TCR stimulation alone. Anti-Vβ17/anti-CD28/anti-BCMA antibody shows higher activation as compared to anti-Vβ17/anti-BCMA antibody. There was no activation observed with anti-CD28/null bispecific antibody but activation was observed with anti-CD28/anti-BCMA antibody.

[0112] FIG. 27 shows cytokine release in Pan T cells with or depleted of Vβ17 in Donor 1. Cytokine secretion is enhanced with CD28 costimulation in a Vβ17 T cell dependent manner.

[0113] FIG. 28 shows cytokine release in Pan T cells with or depleted of Vβ17 in Donor 2. Cytokine secretion is enhanced with CD28 costimulation in a Vβ17 T cell dependent manner.

[0114] FIG. 29 shows activation profile of Vβ17+ and Vβ17− T cells with anti-Vβ17/anti-CD28/anti-BCMA antibodies in the absence of target cells. Combining CD28 costimulation with Vβ17 TCR stimulation enhanced the activation of Vβ17+ cells compared to Vβ17 TCR stimulation alone or in the absence of target cells. Anti-Vβ17/anti-CD28/anti-CD28 antibodies show similar activation as compared to anti-Vβ17/anti-CD28/anti-BCMA antibodies, activation is observed with anti-CD28/anti-BCMA antibody, but there is no activation with anti-CD28/null or anti-CD28/anti-BCMA bispecific antibodies.

[0115] FIG. 30 shows activation profile of Vβ17+ and Vβ17− T cells with anti-Vβ17/anti-CD28/anti-BCMA antibodies in the absence of target cells. Combining CD28 costimulation with Vβ17 TCR stimulation enhanced the activation of Vβ17+ cells compared to Vβ17 TCR stimulation alone. Anti-Vβ17/anti-CD28/anti-CD28 antibodies show higher activation as compared to anti-Vβ17/anti-BCMA antibodies, activation is observed with anti-CD28/anti-BCMA antibody, but there is no activation with anti-CD28/null bispecific antibodies.

[0116] FIG. 31 shows anti-Vβ17/anti-CD28/anti-BCMA antibodies do not induce cytotoxicity against non-TAA cell lines.

[0117] FIG. 32 shows anti-Vβ17/anti-CD28/anti-BCMA antibodies do not induce cytotoxicity against non-TAA cell lines.

[0118] FIG. 33 shows cytotoxicity mediated by anti-Vβ17/anti-CD28/anti-PSMA antibodies. Dose dependent cytotoxicity was observed with only anti-Vβ17/anti-CD28/anti-PSMA antibodies on C4-2B cells. Antibody with PSMB on the CD28 LC N-terminal does not induce cytotoxicity. There was no cytotoxicity induced with anti-Vβ17/null/anti-PSMA antibodies.

### DETAILED DESCRIPTION

[0119] Various publications, articles and patents are cited or described in the background and throughout the specification; each of these references is herein incorporated by reference in its entirety. Discussion of documents, acts, materials, devices, articles or the like which has been included in the present specification is for the purpose of providing context for the invention. Such discussion is not an admission that any or all of these matters form part of the prior art with respect to any inventions disclosed or claimed.

[0120] Unless defined otherwise, all technical and scientific terms used herein have the same meaning as commonly understood to one of ordinary skill in the art to which this invention pertains. Otherwise, certain terms used herein have the meanings as set forth in the specification.

[0121] It must be noted that as used herein and in the appended claims, the singular forms “a,” “an,” and “the” include plural reference unless the context clearly dictates otherwise.

[0122] Unless otherwise stated, any numerical values, such as a concentration or a concentration range described herein, are to be understood as being modified in all instances by the term “about.” Thus, a numerical value typically includes ±10% of the recited value. For example, a concentration of 1 mg/mL includes 0.9 mg/mL to 1.1 mg/mL. Likewise, a concentration range of 1% to 10% (w/v) includes 0.9% (w/v) to 11% (w/v). As used herein, the use of a numerical range expressly includes all possible subranges, all individual numerical values within that range, including integers within such ranges and fractions of the values unless the context clearly indicates otherwise.

[0123] Unless otherwise indicated, the term “at least” preceding a series of elements is to be understood to refer to every element in the series. Those skilled in the art will recognize or be able to ascertain using no more than routine experimentation, many equivalents to the specific embodiments of the invention described herein. Such equivalents are intended to be encompassed by the invention.

[0124] As used herein, the terms “comprises,” “comprising,” “includes,” “including,” “has,” “having,” “contains” or “containing,” or any other variation thereof, will be understood to imply the inclusion of a stated integer or group of integers but not the exclusion of any other integer or group of integers and are intended to be non-exclusive or open-ended. For example, a composition, a mixture, a process, a method, an article, or an apparatus that comprises a list of elements is not necessarily limited to only those elements but can include other elements not expressly listed or inherent to such composition, mixture, process, method, article, or apparatus. Further, unless expressly stated to the contrary, “or” refers to an inclusive or and not to an exclusive or. For example, a condition A or B is satisfied by any one of the following: A is true (or present) and B is false (or not present), A is false (or not present) and B is true (or present), and both A and B are true (or present).

[0125] As used herein, the conjunctive term “and/or” between multiple recited elements is understood as encompassing both individual and combined options. For instance, where two elements are conjoined by “and/or,” a first option refers to the applicability of the first element without the second. A second option refers to the applicability of the second element without the first. A third option refers to the applicability of the first and second elements together. Any one of these options is understood to fall within the meaning, and therefore satisfy the requirement of the term “and/or” as used herein. Concurrent applicability of more than one of the options is also understood to fall within the meaning, and therefore satisfy the requirement of the term “and/or.”

[0126] As used herein, the term “consists of,” or variations such as “consist of” or “consisting of,” as used throughout the specification and claims, indicate the inclusion of any recited integer or group of integers, but that no additional integer or group of integers can be added to the specified method, structure, or composition.

[0127] As used herein, the term “consists essentially of,” or variations such as “consist essentially of” or “consisting essentially of,” as used throughout the specification and claims, indicate the inclusion of any recited integer or group of integers, and the optional inclusion of any recited integer or group of integers that do not materially change the basic or novel properties of the specified method, structure or composition. See M.P.E.P. § 2111.03.

[0128] As used herein, “subject” means any animal, preferably a mammal, most preferably a human. The term “mammal” as used herein, encompasses any mammal. Examples of mammals include, but are not limited to, cows, horses, sheep, pigs, cats, dogs, mice, rats, rabbits, guinea pigs, monkeys, humans, etc., more preferably a human.

[0129] It should also be understood that the terms “about,” “approximately,” “generally,” “substantially,” and like terms, used herein when referring to a dimension or characteristic of a component of the preferred invention, indicate that the described dimension/characteristic is not a strict boundary or parameter and does not exclude minor variations therefrom that are functionally the same or similar, as would be understood by one having ordinary skill in the art. At a minimum, such references that include a numerical parameter would include variations that, using mathematical and industrial principles accepted in the art (e.g., rounding, measurement or other systematic errors, manufacturing tolerances, etc.), would not vary the least significant digit.

[0130] The terms “identical” or percent “identity,” in the context of two or more nucleic acids or polypeptide sequences (e.g., trispecific antibodies and polynucleotides that encode them, Vβ17 polypeptides and Vβ17 polynucleotides that encode them, CD28 polypeptides and CD28 polynucleotides that encode them, BCMA polypeptides and BCMA polynucleotides that encode them, and PSMA polypeptides and PSMA polynucleotides that encode them), refer to two or more sequences or subsequences that are the same or have a specified percentage of amino acid residues or nucleotides that are the same, when compared and aligned for maximum correspondence, as measured using one of the following sequence comparison algorithms or by visual inspection.

[0131] For sequence comparison, typically one sequence acts as a reference sequence, to which test sequences are compared. When using a sequence comparison algorithm, test and reference sequences are input into a computer, subsequence coordinates are designated, if necessary, and sequence algorithm program parameters are designated. The sequence comparison algorithm then calculates the percent sequence identity for the test sequence(s) relative to the reference sequence, based on the designated program parameters.

[0132] Optimal alignment of sequences for comparison can be conducted, e.g., by the local homology algorithm of Smith & Waterman, Adv. Appl. Math. 2:482 (1981), by the homology alignment algorithm of Needleman & Wunsch, J. Mol. Biol. 48:443 (1970), by the search for similarity method of Pearson & Lipman, Proc. Nat'l. Acad. Sci. USA 85:2444 (1988), by computerized implementations of these algorithms (GAP, BESTFIT, FASTA, and TFASTA in the Wisconsin Genetics Software Package, Genetics Computer Group, 575 Science Dr., Madison, Wis.), or by visual inspection (see generally, Current Protocols in Molecular Biology, F. M. Ausubel et al., eds., Current Protocols, a joint venture between Greene Publishing Associates, Inc. and John Wiley & Sons, Inc., (1995 Supplement) (Ausubel)).

[0133] Examples of algorithms that are suitable for determining percent sequence identity and sequence similarity are the BLAST and BLAST 2.0 algorithms, which are described in Altschul et al. (1990) J. Mol. Biol. 215: 403-410 and Altschul et al. (1997) Nucleic Acids Res. 25: 3389-3402, respectively. Software for performing BLAST analyses is publicly available through the National Center for Biotechnology Information. This algorithm involves first identifying high scoring sequence pairs (HSPs) by identifying short words of length W in the query sequence, which either match or satisfy some positive-valued threshold score T when aligned with a word of the same length in a database sequence. T is referred to as the neighborhood word score threshold (Altschul et al., supra). These initial neighborhood word hits act as seeds for initiating searches to find longer HSPs containing them. The word hits are then extended in both directions along each sequence for as far as the cumulative alignment score can be increased.

[0134] Cumulative scores are calculated using, for nucleotide sequences, the parameters M (reward score for a pair of matching residues; always >0) and N (penalty score for mismatching residues; always <0). For amino acid sequences, a scoring matrix is used to calculate the cumulative score. Extension of the word hits in each direction are halted when: the cumulative alignment score falls off by the quantity X from its maximum achieved value; the cumulative score goes to zero or below, due to the accumulation of one or more negative-scoring residue alignments; or the end of either sequence is reached. The BLAST algorithm parameters W, T, and X determine the sensitivity and speed of the alignment. The BLASTN program (for nucleotide sequences) uses as defaults a word length (W) of 11, an expectation (E) of 10, M=5, N=−4, and a comparison of both strands. For amino acid sequences, the BLASTP program uses as defaults a word length (W) of 3, an expectation (E) of 10, and the BLOSUM62 scoring matrix (see Henikoff & Henikoff, Proc. Natl. Acad. Sci. USA 89:10915 (1989)).

[0135] In addition to calculating percent sequence identity, the BLAST algorithm also performs a statistical analysis of the similarity between two sequences (see, e.g., Karlin & Altschul, Proc. Nat'l. Acad. Sci. USA 90:5873-5787 (1993)). One measure of similarity provided by the BLAST algorithm is the smallest sum probability (P(N)), which provides an indication of the probability by which a match between two nucleotide or amino acid sequences would occur by chance. For example, a nucleic acid is considered similar to a reference sequence if the smallest sum probability in a comparison of the test nucleic acid to the reference nucleic acid is less than about 0.1, more preferably less than about 0.01, and most preferably less than about 0.001.

[0136] A further indication that two nucleic acid sequences or polypeptides are substantially identical is that the polypeptide encoded by the first nucleic acid is immunologically cross reactive with the polypeptide encoded by the second nucleic acid, as described below. Thus, a polypeptide is typically substantially identical to a second polypeptide, for example, where the two peptides differ only by conservative substitutions. Another indication that two nucleic acid sequences are substantially identical is that the two molecules hybridize to each other under stringent conditions.

[0137] As used herein, the term “polynucleotide,” synonymously referred to as “nucleic acid molecule,” “nucleotides” or “nucleic acids,” refers to any polyribonucleotide or polydeoxyribonucleotide, which can be unmodified RNA or DNA or modified RNA or DNA. “Polynucleotides” include, without limitation single- and double-stranded DNA, DNA that is a mixture of single- and double-stranded regions, single- and double-stranded RNA, and RNA that is mixture of single- and double-stranded regions, hybrid molecules comprising DNA and RNA that can be single-stranded or, more typically, double-stranded or a mixture of single- and double-stranded regions. In addition, “polynucleotide” refers to triple-stranded regions comprising RNA or DNA or both RNA and DNA. The term polynucleotide also includes DNAs or RNAs containing one or more modified bases and DNAs or RNAs with backbones modified for stability or for other reasons. “Modified” bases include, for example, tritylated bases and unusual bases such as inosine. A variety of modifications can be made to DNA and RNA; thus, “polynucleotide” embraces chemically, enzymatically or metabolically modified forms of polynucleotides as typically found in nature, as well as the chemical forms of DNA and RNA characteristic of viruses and cells. “Polynucleotide” also embraces relatively short nucleic acid chains, often referred to as oligonucleotides.

[0138] As used herein, the term “vector” is a replicon in which another nucleic acid segment can be operably inserted so as to bring about the replication or expression of the segment.

[0139] As used herein, the term “host cell” refers to a cell comprising a nucleic acid molecule of the invention. The “host cell” can be any type of cell, e.g., a primary cell, a cell in culture, or a cell from a cell line. In one embodiment, a “host cell” is a cell transfected with a nucleic acid molecule disclosed herein. In another embodiment, a “host cell” is a progeny or potential progeny of such a transfected cell. A progeny of a cell may or may not be identical to the parent cell, e.g., due to mutations or environmental influences that can occur in succeeding generations or integration of the nucleic acid molecule into the host cell genome.

[0140] The term “expression” as used herein, refers to the biosynthesis of a gene product. The term encompasses the transcription of a gene into RNA. The term also encompasses translation of RNA into one or more polypeptides, and further encompasses all naturally occurring post-transcriptional and post-translational modifications. The expressed trispecific antibody can be within the cytoplasm of a host cell, into the extracellular milieu such as the growth medium of a cell culture or anchored to the cell membrane.

[0141] As used herein, the terms “peptide,” “polypeptide,” or “protein” can refer to a molecule comprised of amino acids and can be recognized as a protein by those of skill in the art. The conventional one-letter or three-letter code for amino acid residues is used herein. The terms “peptide,” “polypeptide,” and “protein” can be used interchangeably herein to refer to polymers of amino acids of any length. The polymer can be linear or branched, it can comprise modified amino acids, and it can be interrupted by non-amino acids. The terms also encompass an amino acid polymer that has been modified naturally or by intervention; for example, disulfide bond formation, glycosylation, lipidation, acetylation, phosphorylation, or any other manipulation or modification, such as conjugation with a labeling component. Also included within the definition are, for example, polypeptides containing one or more analogs of an amino acid (including, for example, unnatural amino acids, etc.), as well as other modifications known in the art.

[0142] The peptide sequences described herein are written according to the usual convention whereby the N-terminal region of the peptide is on the left and the C-terminal region is on the right. Although isomeric forms of the amino acids are known, it is the L-form of the amino acid that is represented unless otherwise expressly indicated.

[0143] Antibodies

[0144] In one aspect, provided herein is a trispecific antibody comprising a first binding domain that binds to Vβ17, a second binding domain that binds to a second target, and a third binding domain that binds to CD28. In some embodiments, the second target is a cancer antigen. In some embodiments, the second target is a tumor-specific antigen. In some embodiments, the second target is a tumor associated antigen (TAA). In some embodiments, the second target is a neoantigen. In some embodiments, the second target is BCMA. In some embodiments, the second target is PSMA.

[0145] Also provided herein are multispecific molecules that bind Vβ17, CD28 and BCMA. In some embodiments, the multispecific molecules are trispecific antibodies. In some embodiments, the trispecific antibody comprises a Vβ17 antibody. Exemplary Vβ17 antibodies are provided herein. In some embodiments, the trispecific antibody comprises a CD28 antibody. Exemplary CD28 antibodies are provided herein. In some embodiments, the trispecific antibody comprises a BCMA antibody. Exemplary BCMA antibodies are provided herein. In some embodiments, the trispecific antibody comprises a Vβ17 antibody, a CD28 antibody, and a BCMA antibody. In some embodiments, the trispecific antibody comprises an antigen binding fragment of a Vβ17 antibody. Exemplary antigen binding fragments of Vβ17 antibodies are provided herein. In some embodiments, the trispecific antibody comprises an antigen binding fragment of a CD28 antibody. Exemplary antigen binding fragments of CD28 antibodies are provided herein. In some embodiments, the trispecific antibody comprises an antigen binding fragment of a BCMA antibody. Exemplary antigen binding fragments of BCMA antibodies are provided herein. In some embodiments, the trispecific antibody comprises an antigen binding fragment of a Vβ17 antibody, an antigen binding fragment of a CD28 antibody, and an antigen binding fragment of a BCMA antibody.

[0146] In certain embodiments, provided herein are anti-Vβ17/anti-BCMA/anti-CD28 trispecific antibodies or antigen-binding fragments thereof, nucleic acids and expression vectors encoding the trispecific antibodies, recombinant cells containing the vectors, and compositions comprising the trispecific antibodies. Methods of making the antibodies, and methods of using the trispecific antibodies to treat diseases, including cancer, are also provided. The antibodies disclosed herein possess one or more desirable functional properties. In some embodiments, the trispecific antibodies provided herein have high-affinity binding to Vβ17. In some embodiments, the trispecific antibodies provided herein have high-affinity binding to BCMA. In some embodiments, the trispecific antibodies provided herein have high-affinity binding to CD28. In some embodiments, the trispecific antibodies provided herein have high specificity to Vβ17. In some embodiments, the trispecific antibodies provided herein have high specificity to a BCMA. In some embodiments, the trispecific antibodies provided herein have high specificity to a CD28. In some embodiments, the trispecific antibodies provided herein have the ability to treat or prevent a disease or disorder when administered alone. In some embodiments, the trispecific antibodies provided herein have the ability to treat or prevent a disease or disorder when administered in combination with other therapies. In some embodiments, the disease or disorder is a cancer. In some embodiments, the disease or disorder is a leukemia or lymphoma.

[0147] Also provided herein are multispecific molecules that bind Vβ17, CD28 and PSMA. In some embodiments, the multispecific molecules are trispecific antibodies. In some embodiments, the trispecific antibody comprises a Vβ17 antibody. Exemplary Vβ17 antibodies are provided herein. In some embodiments, the trispecific antibody comprises a CD28 antibody. Exemplary CD28 antibodies are provided herein. In some embodiments, the trispecific antibody comprises a PSMA antibody. Exemplary PSMA antibodies are provided herein. In some embodiments, the trispecific antibody comprises a Vβ17 antibody, a CD28 antibody, and a PSMA antibody. In some embodiments, the trispecific antibody comprises an antigen binding fragment of a Vβ17 antibody. Exemplary antigen binding fragments of Vβ17 antibodies are provided herein. In some embodiments, the trispecific antibody comprises an antigen binding fragment of a CD28 antibody. Exemplary antigen binding fragments of CD28 antibodies are provided herein. In some embodiments, the trispecific antibody comprises an antigen binding fragment of a PSMA antibody. Exemplary antigen binding fragments of PSMA antibodies are provided herein. In some embodiments, the trispecific antibody comprises an antigen binding fragment of a Vβ17 antibody, an antigen binding fragment of a CD28 antibody, and an antigen binding fragment of a PSMA antibody.

[0148] In certain embodiments, provided herein are anti-Vβ17/anti-PSMA/anti-CD28 trispecific antibodies or antigen-binding fragments thereof, nucleic acids and expression vectors encoding the trispecific antibodies, recombinant cells containing the vectors, and compositions comprising the trispecific antibodies. Methods of making the antibodies, and methods of using the trispecific antibodies to treat diseases, including cancer, are also provided. The antibodies disclosed herein possess one or more desirable functional properties. In some embodiments, the trispecific antibodies provided herein have high-affinity binding to Vβ17. In some embodiments, the trispecific antibodies provided herein have high-affinity binding to PSMA. In some embodiments, the trispecific antibodies provided herein have high-affinity binding to CD28. In some embodiments, the trispecific antibodies provided herein have high specificity to Vβ17. In some embodiments, the trispecific antibodies provided herein have high specificity to a PSMA. In some embodiments, the trispecific antibodies provided herein have high specificity to a CD28. In some embodiments, the trispecific antibodies provided herein have the ability to treat or prevent a disease or disorder when administered alone. In some embodiments, the trispecific antibodies provided herein have the ability to treat or prevent a disease or disorder when administered in combination with other therapies. In some embodiments, the disease or disorder is a cancer. In some embodiments, the disease or disorder is a prostate cancer.

[0149] As used herein, the term “antibody” is used in a broad sense and includes immunoglobulin or antibody molecules including human, humanized, composite and chimeric antibodies and antibody fragments that are monoclonal or polyclonal. In general, antibodies are proteins or peptide chains that exhibit binding specificity to a specific antigen. Antibody structures are well known. Immunoglobulins can be assigned to five major classes (i.e., IgA, IgD, IgE, IgG and IgM), depending on the heavy chain constant domain amino acid sequence. IgA and IgG are further sub-classified as the isotypes IgA1, IgA2, IgG1, IgG2, IgG3 and IgG4. Accordingly, the antibodies provided herein can be of any of the five major classes or corresponding sub-classes. In specific embodiments, the antibodies provided herein are IgG1, IgG2, IgG3 or IgG4. Antibody light chains of vertebrate species can be assigned to one of two clearly distinct types, namely kappa and lambda, based on the amino acid sequences of their constant domains. Accordingly, the antibodies provided herein can contain a kappa or lambda light chain constant domain. According to particular embodiments, the antibodies disclosed herein include heavy and/or light chain constant regions from rat or human antibodies.

[0150] In addition to the heavy and light constant domains, antibodies contain an antigen-binding region that is made up of a light chain variable region (VL) and a heavy chain variable region (VH), each of which contains three domains (i.e., complementarity determining regions 1 (CDR1), CDR2 and CDR3. A “CDR” refers to one of three hypervariable regions (HCDR1, HCDR2 or HCDR3) within the non-framework region of the immunoglobulin (Ig or antibody) VH j-sheet framework, or one of three hypervariable regions (LCDR1, LCDR2 or LCDR3) within the non-framework region of the antibody VL j-sheet framework. Accordingly, CDRs are variable region sequences interspersed within the framework region sequences. CDR regions are well known to those skilled in the art and have been defined by, for example, Kabat as the regions of most hypervariability within the antibody variable (V) domains (Kabat et al., J. Biol. Chem. 252:6609-6616 (1977); Kabat, Adv. Prot. Chem. 32:1-75 (1978)). CDR region sequences also have been defined structurally by Chothia as those residues that are not part of the conserved β-sheet framework, and thus are able to adapt different conformations (Chothia and Lesk, J. Mol. Biol. 196:901-917 (1987)). Both terminologies are well recognized in the art. CDR region sequences have also been defined by AbM, Contact and IMGT. Exemplary CDR region sequences are illustrated herein, for example, in the Sequence Listing, and tables provided in the Examples below. The positions of CDRs within a canonical antibody variable region have been determined by comparison of numerous structures (Al-Lazikani et al., J. Mol. Biol. 273:927-948 (1997); Morea et al., Methods 20:267-279 (2000)). Because the number of residues within a hypervariable region varies in different antibodies, additional residues relative to the canonical positions are conventionally numbered with a, b, c and so forth next to the residue number in the canonical variable region numbering scheme (Al-Lazikani et al., supra (1997)). Such nomenclature is similarly well known to those skilled in the art.

[0151] The light chain variable region CDR1 domain is interchangeably referred to herein as LCDR1 or VL CDR1. The light chain variable region CDR2 domain is interchangeably referred to herein as LCDR2 or VL CDR2. The light chain variable region CDR3 domain is interchangeably referred to herein as LCDR3 or VL CDR3. The heavy chain variable region CDR1 domain is interchangeably referred to herein as HCDR1 or VH CDR1. The heavy chain variable region CDR2 domain is interchangeably referred to herein as HCDR2 or VH CDR2. The heavy chain variable region CDR1 domain is interchangeably referred to herein as HCDR3 or VH CDR3.

[0152] The term “hypervariable region”, such as a VH or VL, when used herein refers to the regions of an antibody variable region that are hypervariable in sequence and/or form structurally defined loops. Generally, antibodies comprise six hypervariable regions; three in the VH (HCDR1, HCDR2, HCDR3), and three in the VL (LCDR1, LCDR2, LCDR3). A number of hypervariable region delineations are in use and are encompassed herein. The “Kabat” CDRs are based on sequence variability and are the most commonly used (see, e.g., Kabat et al., Sequences of Proteins of Immunological Interest, 5th Ed. Public Health Service, National Institutes of Health, Bethesda, Md. (1991)). “Chothia” refers instead to the location of the structural loops (see, e.g., Chothia and Lesk, J. Mol. Biol. 196:901-917 (1987)). The end of the Chothia CDR-HCDR1 loop when numbered using the Kabat numbering convention varies between H32 and H34 depending on the length of the loop (this is because the Kabat numbering scheme places the insertions at H35A and H35B; if neither 35A nor 35B is present, the loop ends at 32; if only 35A is present, the loop ends at 33; if both 35A and 35B are present, the loop ends at 34). The “AbM” hypervariable regions represent a compromise between the Kabat CDRs and Chothia structural loops, and are used by Oxford Molecular's AbM antibody modeling software (see, e.g., Martin, in Antibody Engineering, Vol. 2, Chapter 3, Springer Verlag). “Contact” hypervariable regions are based on an analysis of the available complex crystal structures.

[0153] Recently, a universal numbering system has been developed and widely adopted, ImMunoGeneTics (IMGT) Information System© (Lafranc et al., Dev. Comp. Immunol. 27(1):55-77 (2003)). IMGT is an integrated information system specializing in immunoglobulins (IG), T cell receptors (TR) and major histocompatibility complex (MHC) of human and other vertebrates. Herein, the CDRs are referred to in terms of both the amino acid sequence and the location within the light or heavy chain. As the “location” of the CDRs within the structure of the immunoglobulin variable domain is conserved between species and present in structures called loops, by using numbering systems that align variable domain sequences according to structural features, CDR and framework residues and are readily identified. This information can be used in grafting and replacement of CDR residues from immunoglobulins of one species into an acceptor framework from, typically, a human antibody. An additional numbering system (AHon) has been developed by Honegger and Plückthun, J. Mol. Biol. 309: 657-670 (2001). Correspondence between the numbering system, including, for example, the Kabat numbering and the IMGT unique numbering system, is well known to one skilled in the art (see, e.g., Kabat, supra; Chothia and Lesk, supra; Martin, supra; Lefranc et al., supra). An Exemplary system, shown herein, combines Kabat and Chothia.

| | Exemplary | IMGT | Kabat | AbM | Chothia | Contact |
|---|---|---|---|---|---|---|
| V_{H} CDR1 | 26-35 | 27-38 | 31-35 | 26-35 | 26-32 | 30-35 |
| V_{H} CDR2 | 50-65 | 56-65 | 50-65 | 50-58 | 53-55 | 47-58 |
| V_{H} CDR3 | 95-102 | 105-117 | 95-102 | 95-102 | 96-101 | 93-101 |
| V_{L} CDR1 | 24-34 | 27-38 | 24-34 | 24-34 | 26-32 | 30-36 |
| V_{L} CDR2 | 50-56 | 56-65 | 50-56 | 50-56 | 50-52 | 46-55 |
| V_{L} CDR3 | 89-97 | 105-117 | 89-97 | 89-97 | 91-96 | 89-96 |

[0154] Hypervariable regions may comprise “extended hypervariable regions” as follows: 24-36 or 24-34 (LCDR1), 46-56 or 50-56 (LCDR2) and 89-97 or 89-96 (LCDR3) in the VL and 26-35 or 26-35A (HCDR1), 50-65 or 49-65 (HCDR2) and 93-102, 94-102, or 95-102 (HCDR3) in the VH. CDR sequences, reflecting each of the above numbering schemes, are provided herein, including in the Sequence Listing.

[0155] The term “constant region” or “constant domain” refers to a carboxy terminal portion of the light and heavy chain which is not directly involved in binding of the antibody to antigen but exhibits various effector function, such as interaction with the Fc receptor. The terms refer to the portion of an immunoglobulin molecule having a more conserved amino acid sequence relative to the other portion of the immunoglobulin, the variable region, which contains the antigen binding site. The constant region may contain the CH1, CH2 and CH3 regions of the heavy chain and the CL region of the light chain.

[0156] The term “framework” or “FR” residues are those variable region residues flanking the CDRs. FR residues are present, for example, in chimeric, humanized, human, domain antibodies, diabodies, linear antibodies, and trispecific antibodies. FR residues are those variable domain residues other than the hypervariable region residues or CDR residues.

[0157] As used herein, the term an “isolated antibody” refers to an antibody which is substantially free of other antibodies having different antigenic specificities (e.g., an isolated antibody that specifically binds to Vβ17 is substantially free of antibodies that do not bind to Vβ17; an isolated antibody that specifically binds to a second target (e.g., a cancer antigen, such as BCMA or PSMA) is substantially free of antibodies that do not bind to the second target; an isolated antibody that specifically binds to a third target (e.g., CD28) is substantially free of antibodies that do not bind to the second target (e.g., CD28). In addition, an isolated antibody is substantially free of other cellular material and/or chemicals.

[0158] As used herein, the term “monoclonal antibody” refers to an antibody obtained from a population of substantially homogeneous antibodies, i.e., the individual antibodies comprising the population are identical except for possible naturally occurring mutations that can be present in minor amounts. The monoclonal antibodies disclosed herein can be made by the hybridoma method, phage display technology, single lymphocyte gene cloning technology, or by recombinant DNA methods. For example, the monoclonal antibodies can be produced by a hybridoma which includes a B cell obtained from a transgenic nonhuman animal, such as a transgenic mouse or rat, having a genome comprising a human heavy chain transgene and a light chain transgene.

[0159] As used herein, the term “antigen-binding fragment” refers to an antibody fragment such as, for example, a diabody, a Fab, a Fab′, a F(ab′)2, an Fv fragment, a disulfide stabilized Fv fragment (dsFv), a (dsFv)₂, a bispecific dsFv (dsFv-dsFv′), a disulfide stabilized diabody (ds diabody), a single-chain antibody molecule (scFv), a single domain antibody (sdAb) an scFv dimer (bivalent diabody), a multispecific antibody formed from a portion of an antibody comprising one or more CDRs, a camelized single domain antibody, a nanobody, a domain antibody, a bivalent domain antibody, or any other antibody fragment that binds to an antigen but does not comprise a complete antibody structure. An antigen-binding fragment is capable of binding to the same antigen to which the parent antibody or a parent antibody fragment binds. According to particular embodiments, the antigen-binding fragment comprises a light chain variable region, a light chain constant region, and an Fd segment of the heavy chain. According to other particular embodiments, the antigen-binding fragment comprises Fab and F(ab′).

[0160] As used herein, the term “single-chain antibody” refers to a conventional single-chain antibody in the field, which comprises a heavy chain variable region and a light chain variable region connected by a short peptide of about 15 to about 20 amino acids. As used herein, the term “single domain antibody” refers to a conventional single domain antibody in the field, which comprises a heavy chain variable region and a heavy chain constant region or which comprises only a heavy chain variable region.

[0161] As used herein, the term “human antibody” refers to an antibody produced by a human or an antibody having an amino acid sequence corresponding to an antibody produced by a human made using any technique known in the art. This definition of a human antibody includes intact or full-length antibodies, fragments thereof, and/or antibodies comprising at least one human heavy and/or light chain polypeptide.

[0162] As used herein, the term “humanized antibody” refers to a non-human antibody that is modified to increase the sequence homology to that of a human antibody, such that the antigen-binding properties of the antibody are retained, but its antigenicity in the human body is reduced.

[0163] As used herein, the term “chimeric antibody” refers to an antibody wherein the amino acid sequence of the immunoglobulin molecule is derived from two or more species. The variable region of both the light and heavy chains often corresponds to the variable region of an antibody derived from one species of mammal (e.g., mouse, rat, rabbit, etc.) having the desired specificity, affinity, and capability, while the constant regions correspond to the sequences of an antibody derived from another species of mammal (e.g., human) to avoid eliciting an immune response in that species.

[0164] The term “specificity” refers to selective recognition of an antigen binding protein (such as an antibody) for a particular epitope of an antigen. Natural antibodies, for example, are monospecific. The term “multispecific” as used herein denotes that an antigen binding protein (such as an antibody) has two or more antigen-binding sites of which at least two bind different antigens. “Bispecific” as used herein denotes that an antigen binding protein has two different antigen-binding specificities.

[0165] As used herein, the term “multispecific antibody” refers to an antibody that comprises a plurality of immunoglobulin variable domain sequences, wherein a first immunoglobulin variable domain sequence of the plurality has binding specificity for a first epitope and a second immunoglobulin variable domain sequence of the plurality has binding specificity for a second epitope. In an embodiment, the first and second epitopes do not overlap or do not substantially overlap. In an embodiment, the first and second epitopes are on different antigens, e.g., the different proteins (or different subunits of a multimeric protein). In an embodiment, a multispecific antibody comprises a third, fourth, or fifth immunoglobulin variable domain. In an embodiment, a multispecific antibody is a bispecific antibody molecule, a trispecific antibody molecule, or a tetraspecific antibody molecule.

[0166] As used herein, the term “trispecific antibody” refers to a multispecific antibody that binds no more than three epitopes or three antigens. A trispecific antibody is characterized by a first immunoglobulin variable domain sequence which has binding specificity for a first epitope (e.g., an epitope on a Vβ17 antigen), a second immunoglobulin variable domain sequence that has binding specificity for a second epitope (e.g., an epitope on a BCMA or PSMA antigen) and a third immunoglobulin variable domain sequence that has binding specificity for a third epitope (e.g., an epitope on a CD28 antigen). In an embodiment, the first, second and third epitopes are on different antigens, e.g., the different proteins (or different subunits of a multimeric protein). In an embodiment, a trispecific antibody comprises a heavy chain variable domain sequence and a light chain variable domain sequence which have binding specificity for a first epitope, a heavy chain variable domain sequence and a light chain variable domain sequence which have binding specificity for a second epitope, and a heavy chain variable domain sequence and a light chain variable domain sequence which have binding specificity for a third epitope. In an embodiment, a trispecific antibody comprises a half antibody, or fragment thereof, having binding specificity for a first epitope, a half antibody, or fragment thereof, having binding specificity for a second epitope, and a half antibody, or fragment thereof, having binding specificity for a third epitope. In an embodiment, a trispecific antibody comprises a scFv, or fragment thereof, having binding specificity for a first epitope, a scFv, or fragment thereof, having binding specificity for a second epitope, and a scFv, or fragment thereof, having binding specificity for a third epitope. In an embodiment, the first epitope is located on Vβ17, the second epitope is located on BCMA and the third epitope is located on CD28. In an embodiment, the first epitope is located on Vβ17, the second epitope is located on PSMA and the third epitope is located on CD28.

[0167] The term “valent” as used herein denotes the presence of a specified number of binding sites in an antigen binding protein (such as an antibody). A natural antibody for example or a full length antibody has two binding sites and is bivalent. As such, the terms “trivalent”, “tetravalent”, “pentavalent” and “hexavalent” denote the presence of two binding site, three binding sites, four binding sites, five binding sites, and six binding sites, respectively, in an antigen binding protein (such as an antibody).

[0168] The term “half antibody” as used herein refers to one immunoglobulin heavy chain associated with one immunoglobulin light chain. One skilled in the art will readily appreciate that a half-antibody can encompass a fragment thereof and can also have an antigen binding domain consisting of a single variable domain, e.g., originating from a camelidae.

[0169] As used herein, the term “Vβ17” refers to a T cell receptor, which is expressed in response to an immune response on a cytotoxic T cell. Vβ17-expressing CD8+ T cells are commonly produced in response to influenza A virus exposure in a subject. Vβ17-expressing CD8+ T cells provide great recall in response to influenza exposure in the subject. The term “Vβ17” includes any Vβ17 variant, isoform, and species homolog, which is naturally expressed by cells (including T cells) or can be expressed on cells transfected with genes or cDNA encoding the polypeptide. Unless noted, preferably the Vβ17 is a human Vβ17. An exemplary human Vβ17 amino acid sequence is provided by GenBank Accession Number AAB49730.1.

[0170] As used herein, the term “BCMA” refers to B-cell maturation antigen, also known as tumor necrosis factor receptor superfamily member 17 (TNFRSF17), is a protein that in humans is encoded by the TNFRSF17 gene. BCMA is a cell surface receptor of the TNF receptor superfamily which recognizes B-cell activating factor. BCMA is preferentially expressed in mature B lymphocytes. The term “BCMA” includes any BCMA variant, isoform, and species homolog, which is naturally expressed by cells (including B cells) or can be expressed on cells transfected with genes or cDNA encoding the polypeptide. Unless noted, preferably the BCMA is a human BCMA. An exemplary human BCMA nucleotide sequence is provided by GenBank Accession Number BC058291. There are four major haplotypes of the BCMA gene in the human genome, and in the present disclosure the term “BCMA” is meant to encompass all four (Kawasaki et al., Genes Immun. 2:276-9, 2001).

[0171] As used herein, the term “prostate-specific membrane antigen” or “PSMA” refers to a type II membrane protein expressed on certain cells. The term “PSMA” as used herein includes the protein referred as HGNC: 3788, Entrez Gene: 2346, Ensembl: ENSG00000086205, OMIM: 600934, and UniProtKB: Q04609. The term “PSMA” includes any PSMA variant, isoform, and species homolog, which is naturally expressed by cells (including prostate cells) or can be expressed on cells transfected with genes or cDNA encoding the polypeptide. In specific embodiments, the PSMA is a human PSMA. The term “antibody against PSMA” or “anti-PSMA antibody” as used herein relates to an antibody specifically binding to PSMA.

[0172] As used herein, the term “CD28” refers to Cluster of Differentiation 28, which is constitutively expressed on the surface of T cells and some natural killer cells. CD28 is also expressed on some B cells. CD28 is a type I transmembrane glycoprotein and is a member of the Immunoglobulin family by virtue of its single Ig variable-like extracellular domain. The term “CD28” includes any CD28 variant, isoform, and species homolog, which is naturally expressed by cells (including T cells) or can be expressed on cells transfected with genes or cDNA encoding the polypeptide. Unless noted, preferably the CD28 is a human CD28. An exemplary human CD28 amino acid sequence is disclosed in NCBI Accession No. NP_006130.

[0173] As used herein, an antibody that “specifically binds to Vβ17” refers to an antibody that binds to a Vβ17, preferably a human Vβ17, with a KD of 1×10⁻⁷ M or less, such as 1×10⁻⁸ M or less, 5×10⁻⁹ M or less, 1×10⁻⁹ M or less, 5×10⁻¹⁰ M or less, or 1×10⁻¹⁰ M or less.

[0174] As used herein, an antibody that “specifically binds to BCMA” refers to an antibody that binds to a BCMA, preferably a human BCMA, with a KD of 1×10⁻⁷ M or less, preferably 1×10⁻⁸ M or less, more preferably 5×10⁻⁹ M or less, 1×10⁻⁹ M or less, 5×10⁻¹⁰ M or less, or 1×10⁻¹⁰ M or less.

[0175] As used herein, an antibody that “specifically binds to CD28” refers to an antibody that binds to a CD28, preferably a human CD28, with a KD of 1×10⁻⁷ M or less, preferably 1×10⁻⁸ M or less, more preferably 5×10⁻⁹ M or less, 1×10⁻⁹ M or less, 5×10⁻¹⁰ M or less, or 1×10⁻¹⁰ M or less.

[0176] The term “KD” refers to the dissociation constant, which is obtained from the ratio of Kd to Ka (i.e., Kd/Ka) and is expressed as a molar concentration (M). KD values for antibodies can be determined using methods in the art in view of the present disclosure. For example, the KD of an antibody can be determined by using surface plasmon resonance, such as by using a biosensor system, e.g., a Biacore® system, or by using bio-layer interferometry technology, such as an Octet RED96 system.

[0177] The smaller the value of the KD of an antibody, the higher affinity that the antibody binds to a target antigen.

[0178] In one aspect, provided is a Vβ17×CD28 trispecific antibody that binds to Vβ17, a second target, and CD28. In some embodiments, the second target is a cancer antigen. In some embodiments, the second target is a tumor-specific antigen. In some embodiments, the second target is a tumor associated antigen (TAA). In some embodiments, the second target is a neoantigen. In some embodiments, the second target is BCMA. In some embodiments, the second target is PSMA. In some embodiments, the antibody is a humanized antibody.

[0179] In some embodiments, the Vβ17×CD28 trispecific antibody is a Vβ17×(cancer antigen)×CD28 trispecific antibody. In some embodiments, the Vβ17×CD28 trispecific antibody is a Vβ17×TAA×CD28 trispecific antibody. In some embodiments, the Vβ17×CD28 trispecific antibody is a Vβ17×BCMA×CD28 trispecific antibody. In some embodiments, the Vβ17×CD28 trispecific antibody is a Vβ17×PSMA×CD28 trispecific antibody. Various exemplary Vβ17×CD28 trispecific antibodies are provided herein.

[0180] In certain embodiments, provided herein is an Vβ17×CD28 trispecific antibody comprising a VH region, VL region, VH CDR1, VH CDR2, VH CDR3, VL CDR1, VL CDR2, and/or VL CDR3 of any one of the antibodies described herein. In some embodiments, provided herein is a Vβ17×CD28 trispecific antibody comprising a VH region of any one of the antibodies described herein. In some embodiments, provided herein is a Vβ17×CD28 trispecific antibody comprising a VL region of any one of the antibodies described herein. In some embodiments, provided herein is a Vβ17×CD28 trispecific antibody comprising a VH region of any one of the antibodies described herein, and a VL region of any one of the antibodies described herein. In some embodiments, provided herein is a Vβ17×CD28 trispecific antibody comprising a VH CDR1, VH CDR2, and VH CDR3 of any one of the antibodies described herein. In some embodiments, provided herein is a Vβ17×CD28 trispecific antibody comprising a VL CDR1, VL CDR2, and VL CDR3 of any one of the antibodies described herein. In some embodiments, provided herein is a Vβ17×CD28 trispecific antibody comprising a VH CDR1, VH CDR2, and VH CDR3 of any one of the antibodies described herein; and a VL CDR1, VL CDR2, and VL CDR3 of any one of the antibodies described herein. Representative VH and VL amino acid sequences, including VH CDR1, VH CDR2, VH CDR3, VL CDR1, VL CDR2 and VL CDR3 amino acid sequences, of Vβ17×CD28 trispecific antibodies provided herein are provided in the Sequence Listing, as well as the Figures, and Tables in the Examples section.

[0181] In certain embodiments, provided is a Vβ17×CD28 trispecific antibody that is an intact antibody. In other embodiments, provided is an antigen binding fragment of the Vβ17×CD28 trispecific antibody. In some embodiments, the antigen binding fragment of the Vβ17×CD28 trispecific antibody is a functional fragment. In some embodiments, the antigen binding fragment is a diabody. In some embodiments, the antigen binding fragment is a Fab. In some embodiments, the antigen binding fragment is a Fab′. In some embodiments, the antigen binding fragment is a F(ab′)2. In some embodiments, the antigen binding fragment is a Fv fragment. In some embodiments, the antigen binding fragment is a disulfide stabilized Fv fragment (dsFv). In some embodiments, the antigen binding fragment is a (dsFv)₂. In some embodiments, the antigen binding fragment is a trispecific dsFv (dsFv-dsFv′). In some embodiments, the antigen binding fragment is a disulfide stabilized diabody (ds diabody). In some embodiments, the antigen binding fragment is a single-chain antibody molecule (scFv). In some embodiments, the antigen binding fragment is a single domain antibody (sdAb). In some embodiments, the antigen binding fragment is an scFv dimer (bivalent diabody). In some embodiments, the antigen binding fragment is a multispecific antibody formed from a portion of an antibody comprising one or more CDRs. In some embodiments, the antigen binding fragment is a camelized single domain antibody. In some embodiments, the antigen binding fragment is a nanobody. In some embodiments, the antigen binding fragment is a domain antibody. In some embodiments, the antigen binding fragment is a bivalent domain antibody. In some embodiments, the antigen binding fragment is an antibody fragment that binds to an antigen but does not comprise a complete antibody structure. In some embodiments, the Vβ17×CD28 trispecific antibody comprises a single chain antibody. In some embodiments, Vβ17×CD28 trispecific antibody comprises a single domain antibody. In certain embodiments, the Vβ17×CD28 trispecific antibody comprises a nanobody. In certain embodiments, the Vβ17×CD28 trispecific antibody comprises a VHH antibody. In certain embodiments, Vβ17×CD28 trispecific antibody comprises a llama antibody. In some embodiments, the Vβ17×CD28 trispecific antibody does not comprise a single chain antibody. In some embodiments, the Vβ17×CD28 trispecific antibody does not comprise a single domain antibody. In certain embodiments, the Vβ17×CD28 trispecific antibody does not comprise a nanobody. In certain embodiments, Vβ17×CD28 trispecific antibody does not comprise a VHH antibody. In certain embodiments, the Vβ17×CD28 trispecific antibody does not comprise a llama antibody. It will be appreciated that any form of trispecific antibody known in the art is contemplated.

[0182] In some embodiments, the Vβ17×CD28 trispecific antibody is comprised in a multispecific antibody. In certain embodiments, the Vβ17×CD28 trispecific antibody comprises an antigen binding fragment of an anti-Vβ17 antibody provided herein. In certain embodiments, the Vβ17×CD28 trispecific antibody comprises an antigen binding fragment of an anti-CD28 antibody provided herein. In certain embodiments, the Vβ17×CD28 trispecific antibody comprises an antigen binding fragment of an anti-BCMA antibody provided herein. In certain embodiments, the Vβ17×CD28 trispecific antibody comprises an antigen binding fragment of an anti-PSMA antibody provided herein.

[0183] In some embodiments, the Vβ17×CD28 trispecific antibody is an agonistic antibody. In certain embodiments, the Vβ17×CD28 trispecific antibody activates T cells. In other embodiments, the Vβ17×CD28 trispecific antibody is an antagonistic antibody. In certain embodiments, the Vβ17×CD28 trispecific antibody inactivates T cells. In some embodiments, the Vβ17×CD28 trispecific antibody blocks activation of T cells. In some embodiments, the Vβ17×CD28 trispecific antibody modulates the activity of T cells. In some embodiments, the Vβ17×CD28 trispecific antibody neither activates or inactivates the activity of T cells. In specific embodiments, the T cells are human T cells. In specific embodiments, provided is a trispecific antibody comprising a Vβ17×BCMA×CD28 antibody provided herein in a knob-in-hole format. In some embodiments, an Vβ17×CD28 trispecific antibody provided herein may be comprised in a trispecific antibody. In some embodiments, an anti-Vβ17×CD28 trispecific antibody provided herein is comprised in a multispecific antibody.

[0184] In certain embodiments, a trispecific antibody provided herein comprises a first binding domain comprising an anti-Vβ17 antibody provided herein that binds to a Vβ17 epitope, a second binding domain comprising an anti-PSMA antibody provided herein that binds to a PSMA epitope, and a third binding domain comprising an anti-CD28 antibody provided herein that binds to a CD28 epitope. In certain embodiments, a trispecific antibody provided herein comprises a first binding domain comprising an anti-Vβ17 antigen binding fragment provided herein that binds to a Vβ17 epitope, a second binding domain comprising an anti-PSMA antigen binding fragment provided herein that binds to a PSMA epitope, and a third binding domain comprising an anti-CD28 antigen binding fragment provided herein that binds to a CD28 epitope.

[0185] In one aspect, provided herein is an antibody that binds to Vβ17, BCMA and CD28. In one aspect, provided herein is an antibody that binds to Vβ17, BCMA or CD28. In some embodiments, the anti-Vβ17/anti-BCMA/anti-CD28 antibody is a humanized antibody.

[0186] In one aspect, provided herein is an antibody that binds to Vβ17, BCMA and CD28. In one aspect, provided herein is an antibody that binds to Vβ17, BCMA or CD28. In some embodiments, the anti-Vβ17/anti-BCMA/anti-CD28 antibody is a humanized antibody.

[0187] In certain embodiments, provided herein is an anti-Vβ17/anti-BCMA/anti-CD28 trispecific antibody comprising a VH region, VL region, VH CDR1, VH CDR2, VH CDR3, VL CDR1, VL CDR2, and/or VL CDR3 of any one of the antibodies described herein. In some embodiments, provided herein is an anti-Vβ17/anti-BCMA/anti-CD28 trispecific antibody comprising a VH region of any one of the antibodies described herein. In some embodiments, provided herein is an anti-Vβ17/anti-BCMA/anti-CD28 trispecific antibody comprising a VL region of any one of the antibodies described herein. In some embodiments, provided herein is an anti-Vβ17/anti-BCMA/anti-CD28 trispecific antibody comprising a VH region of any one of the antibodies described herein, and a VL region of any one of the antibodies described herein. In some embodiments, provided herein is an anti-Vβ17/anti-BCMA/anti-CD28 trispecific antibody comprising a VH CDR1, VH CDR2, and VH CDR3 of any one of the antibodies described herein. In some embodiments, provided herein is an anti-Vβ17/anti-BCMA/anti-CD28 trispecific antibody comprising a VL CDR1, VL CDR2, and VL CDR3 of any one of the antibodies described herein. In some embodiments, provided herein is an anti-Vβ17/anti-BCMA/anti-CD28 trispecific antibody comprising a VH CDR1, VH CDR2, and VH CDR3 of any one of the antibodies described herein; and a VL CDR1, VL CDR2, and VL CDR3 of any one of the antibodies described herein. Representative VH and VL amino acid sequences, including VH CDR1, VH CDR2, VH CDR3, VL CDR1, VL CDR2 and VL CDR3 amino acid sequences, of anti-Vβ17/anti-BCMA/anti-CD28 trispecific antibodies provided herein are provided in the Sequence Listing.

[0188] In certain embodiments, provided is an anti-Vβ17/anti-BCMA/anti-CD28 antibody that is an intact antibody. In other embodiments, provided is an anti-Vβ17/anti-BCMA/anti-CD28 antibody is an antigen binding fragment of the anti-Vβ17/anti-BCMA/anti-CD28 antibody. In some embodiments, the antigen binding fragment of the anti-Vβ17/anti-BCMA/anti-CD28 antibody is a functional fragment. In some embodiments, the antigen binding fragment is a diabody. In some embodiments, the antigen binding fragment is a Fab. In some embodiments, the antigen binding fragment is a Fab′. In some embodiments, the antigen binding fragment is a F(ab′)2. In some embodiments, the antigen binding fragment is a Fv fragment. In some embodiments, the antigen binding fragment is a disulfide stabilized Fv fragment (dsFv). In some embodiments, the antigen binding fragment is a (dsFv)₂. In some embodiments, the antigen binding fragment is a trispecific dsFv (dsFv-dsFv′). In some embodiments, the antigen binding fragment is a disulfide stabilized diabody (ds diabody). In some embodiments, the antigen binding fragment is a single-chain antibody molecule (scFv). In some embodiments, the antigen binding fragment is a single domain antibody (sdAb). In some embodiments, the antigen binding fragment is an scFv dimer (bivalent diabody). In some embodiments, the antigen binding fragment is a multispecific antibody formed from a portion of an antibody comprising one or more CDRs. In some embodiments, the antigen binding fragment is a camelized single domain antibody. In some embodiments, the antigen binding fragment is a nanobody. In some embodiments, the antigen binding fragment is a domain antibody. In some embodiments, the antigen binding fragment is a bivalent domain antibody. In some embodiments, the antigen binding fragment is an antibody fragment that binds to an antigen but does not comprise a complete antibody structure. In some embodiments, the anti-Vβ17/anti-BCMA/anti-CD28 trispecific antibody comprises a single chain antibody. In some embodiments, the anti-Vβ17/anti-BCMA/anti-CD28 trispecific antibody comprises a single domain antibody. In certain embodiments, the anti-Vβ17/anti-BCMA/anti-CD28 trispecific antibody comprises a nanobody. In certain embodiments, the anti-Vβ17/anti-BCMA/anti-CD28 trispecific antibody comprises a VHH antibody. In certain embodiments, the anti-Vβ17/anti-BCMA/anti-CD28 trispecific antibody comprises a llama antibody. In some embodiments, the anti-Vβ17/anti-BCMA/anti-CD28 trispecific antibody does not comprise a single chain antibody. In some embodiments, the anti-Vβ17/anti-BCMA/anti-CD28 trispecific antibody does not comprise a single domain antibody. In certain embodiments, the anti-Vβ17/anti-BCMA/anti-CD28 trispecific antibody does not comprise a nanobody. In certain embodiments, the anti-Vβ17/anti-BCMA/anti-CD28 trispecific antibody does not comprise a VHH antibody. In certain embodiments, the anti-Vβ17/anti-BCMA/anti-CD28 trispecific antibody does not comprise a llama antibody. It will be appreciated that any form of trispecific antibody known in the art is contemplated.

[0189] In some embodiments, the anti-Vβ17/anti-BCMA/anti-CD28 antibody is a multispecific antibody. In other embodiments, the anti-Vβ17/anti-BCMA/anti-CD28 is a trispecific antibody. In certain embodiments, the multispecific antibody comprises an antigen binding fragment of an anti-Vβ17 antibody, an anti-BCMA antibody, and an anti-CD28 antibody provided herein. In other embodiments, the trispecific antibody comprises an antigen binding fragment of an anti-Vβ17 antibody, an anti-BCMA antibody, and an anti-CD28 antibody provided herein. In some embodiments, the anti-Vβ17/anti-BCMA/anti-CD28 antibody is an agonistic antibody. In certain embodiments, the anti-Vβ17/anti-BCMA/anti-CD28 antibody activates T cells. In other embodiments, the anti-Vβ17/anti-BCMA/anti-CD28 antibody is an antagonistic antibody. In certain embodiments, the anti-Vβ17/anti-BCMA/anti-CD28 antibody inactivates T cells. In some embodiments, the anti-Vβ17/anti-BCMA/anti-CD28 antibody blocks activation of T cells. In some embodiments, the anti-Vβ17/anti-BCMA/anti-CD28 antibody modulates the activity of T cells. In some embodiments, the anti-Vβ17/anti-BCMA/anti-CD28 antibody neither activates or inactivates the activity of T cells. In specific embodiments, the T cells are human T cells. In specific embodiments, provided is a trispecific antibody comprising a Vβ17×BCMA×CD28 antibody provided herein in a knob-in-hole format. In some embodiments, an anti-Vβ17/anti-BCMA/anti-CD28 antibody provided herein may be comprised in a trispecific antibody. In some embodiments, an anti-Vβ17/anti-BCMA/anti-CD28 trispecific antibody provided herein may be comprised in a multispecific antibody.

[0190] In certain embodiments, a trispecific antibody provided herein comprises a first binding domain comprising an anti-Vβ17 antibody provided herein that binds to a Vβ17 epitope, a second binding domain comprising an anti-BCMA antibody provided herein that binds to a BCMA epitope, and a third binding domain comprising an anti-CD28 antibody provided herein that binds to a CD28 epitope. In certain embodiments, a trispecific antibody provided herein comprises a first binding domain comprising an anti-Vβ17 antigen binding fragment provided herein that binds to a Vβ17 epitope, a second binding domain comprising an anti-BCMA antigen binding fragment provided herein that binds to a BCMA epitope, and a third binding domain comprising an anti-CD28 antigen binding fragment provided herein that binds to a CD28 epitope.

[0191] In some embodiments, the VH CDR1, VH CDR2, VH CDR3, VL CDR1, VL CDR2, and VL CDR3 sequences are according to the Kabat numbering system. In some embodiments, the VH CDR1, VH CDR2, VH CDR3, VL CDR1, VL CDR2, and VL CDR3 sequences are according to the Chothia numbering system. In some embodiments, the VH CDR1, VH CDR2, VH CDR3, VL CDR1, VL CDR2, and VL CDR3 sequences are according to the Exemplary numbering system. In some embodiments, the VH CDR1, VH CDR2, VH CDR3, VL CDR1, VL CDR2, and VL CDR3 sequences are according to the Contact numbering system. In some embodiments, the VH CDR1, VH CDR2, VH CDR3, VL CDR1, VL CDR2, and VL CDR3 sequences are according to the IMGT numbering system. In some embodiments, the VH CDR1, VH CDR2, VH CDR3, VL CDR1, VL CDR2, and VL CDR3 sequences are according to the AbM numbering system. Exemplary sets of 6 CDRs (VH CDR1-3 and VL CDR1-3) of certain antibody embodiments are provided herein. Other sets of CDRs are contemplated and within the scope of the antibody embodiments provided herein.

[0192] In one aspect, provided herein is a trispecific antibody comprising: (a) a first binding domain that binds to Vβ17, (b) a second binding domain that binds to second target, and (c) a third binding domain that binds to CD28. In specific embodiments, the second target is a cancer antigen. Thus, in certain aspects, provided herein is a trispecific antibody comprising: (a) a first binding domain that binds to Vβ17, (b) a second binding domain that binds to cancer antigen, and (c) a third binding domain that binds to CD28. In some embodiments, the cancer antigen is a tumor associated antigen (TAA). In some embodiments, the cancer antigen is a tumor specific antigen. In some embodiments, the cancer antigen is a neoantigen. In some embodiments, the cancer antigen is BCMA. In some embodiments, the cancer antigen is PSMA. Thus, in one aspect, provided herein is a trispecific antibody comprising: (a) a first binding domain that binds to Vβ17, (b) a second binding domain that binds to BCMA, and (c) a third binding domain that binds to CD28. In another aspect, provided herein is a trispecific antibody comprising: (a) a first binding domain that binds to Vβ17, (b) a second binding domain that binds to BCMA, and (c) a third binding domain that binds to CD28.

[0193] In some embodiments, the first binding domain that binds to Vβ17 comprises VH CDR1, VH CDR2, and VH CDR3 amino acid sequences of a Vβ17 antibody provided herein. In some embodiments, the first binding domain that binds to Vβ17 comprises VL CDR1, VL CDR2 and VL CDR3 amino acid sequences of a Vβ17 antibody provided herein. In some embodiments, the first binding domain that binds to Vβ17 comprises VH CDR1, VH CDR2, VH CDR3, VL CDR1, VL CDR2 and VL CDR3 amino acid sequences of a Vβ17 antibody provided herein. In other embodiments, the first binding domain that binds to Vβ17 comprises VH amino acid sequence of a Vβ17 antibody provided herein. In other embodiments, the first binding domain that binds to Vβ17 comprises a VL amino acid sequence of a Vβ17 antibody provided herein. In other embodiments, the first binding domain that binds to Vβ17 comprises VH and VL amino acid sequences of a Vβ17 antibody provided herein. In other embodiments, the first binding domain that binds to Vβ17 comprises heavy chain amino acid sequence of a Vβ17 antibody provided herein. In other embodiments, the first binding domain that binds to Vβ17 comprises a light chain amino acid sequence of a Vβ17 antibody provided herein. In other embodiments, the first binding domain that binds to Vβ17 comprises heavy chain and light chain amino acid sequences of a Vβ17 antibody provided herein. In some embodiments, the Vβ17 antibody is clone E17.5F. In some embodiments, the Vβ17 antibody is clone B17B1. In some embodiments, the Vβ17 antibody is clone B17H1. In some embodiments, the Vβ17 antibody is clone B17H3. In some embodiments, the Vβ17 antibody is clone B17H4. In some embodiments, the Vβ17 antibody is clone B17H5. In some embodiments, the Vβ17 antibody is clone. In some embodiments, the Vβ17 antibody is clone B17B14. In some embodiments, the Vβ17 antibody is clone B17B15. In some embodiments, the Vβ17 antibody is clone B17B16. In some embodiments, the Vβ17 antibody is clone B17B17. In some embodiments, the Vβ17 antibody is clone B17B18. In some embodiments, the Vβ17 antibody is clone B17B19. In some embodiments, the Vβ17 antibody is clone B17B20. In some embodiments, the Vβ17 antibody is clone B17B21. In some embodiments, the Vβ17 antibody is clone B17B22. In some embodiments, the Vβ17 antibody is clone B17B2. In some embodiments, the Vβ17 antibody is clone Vb17_202B4D1. In some embodiments, the Vβ17 antibody is clone Vb17_210E10A1. In some embodiments, the Vβ17 antibody is clone B17B663. In some embodiments, the Vβ17 antibody is clone B17B694. In some embodiments, the Vβ17 antibody is clone B17B698. In some embodiments, the Vβ17 antibody is clone B17B733. In some embodiments, the Vβ17 antibody is clone Vb17_N33S. Other Vβ17 antibodies, including antigen binding fragments thereof, are also contemplated as the first binding arm that binds to Vβ17 of in the trispecific antibodies provided herein.

[0194] In some embodiments, the first binding domain that binds to Vβ17 comprises: (i) a VH comprising a VH CDR1 having an amino acid sequence of SEQ ID NO:1, a VH CDR2 having an amino acid sequence of SEQ ID NO:2, and a VH CDR3 having an amino acid sequence of SEQ ID NO:3; and (ii) a VL comprising a VL CDR1 having an amino acid sequence of SEQ ID NO:4, a VL CDR2 having an amino acid sequence of SEQ ID NO:5, and a VL CDR3 having an amino acid sequence of SEQ ID NO:6. In some embodiments, the first binding domain that binds to Vβ17 comprises: (i) a VH comprising a VH CDR1 having an amino acid sequence of SEQ ID NO:97, a VH CDR2 having an amino acid sequence of SEQ ID NO:98, and a VH CDR3 having an amino acid sequence of SEQ ID NO:99; and (ii) a VL comprising a VL CDR1 having an amino acid sequence of SEQ ID NO:100, a VL CDR2 having an amino acid sequence of SEQ ID NO:101, and a VL CDR3 having an amino acid sequence of SEQ ID NO:102. In some embodiments, the first binding domain that binds to Vβ17 comprises: (i) a VH comprising a VH CDR1 having an amino acid sequence of SEQ ID NO:103, a VH CDR2 having an amino acid sequence of SEQ ID NO:104, and a VH CDR3 having an amino acid sequence of SEQ ID NO:105; and (ii) a VL comprising a VL CDR1 having an amino acid sequence of SEQ ID NO:106, a VL CDR2 having an amino acid sequence of SEQ ID NO:107, and a VL CDR3 having an amino acid sequence of SEQ ID NO:108. In some embodiments, the first binding domain that binds to Vβ17 comprises: (i) a VH comprising a VH CDR1 having an amino acid sequence of SEQ ID NO:109, a VH CDR2 having an amino acid sequence of SEQ ID NO:110, and a VH CDR3 having an amino acid sequence of SEQ ID NO:111; and (ii) a VL comprising a VL CDR1 having an amino acid sequence of SEQ ID NO:112, a VL CDR2 having an amino acid sequence of SEQ ID NO:113, and a VL CDR3 having an amino acid sequence of SEQ ID NO:114. In some embodiments, the first binding domain that binds to Vβ17 comprises: (i) a VH comprising a VH CDR1 having an amino acid sequence of SEQ ID NO:115, a VH CDR2 having an amino acid sequence of SEQ ID NO:116, and a VH CDR3 having an amino acid sequence of SEQ ID NO:117; and (ii) a VL comprising a VL CDR1 having an amino acid sequence of SEQ ID NO:118, a VL CDR2 having an amino acid sequence of SEQ ID NO:119, and a VL CDR3 having an amino acid sequence of SEQ ID NO:120. In some embodiments, the first binding domain that binds to Vβ17 comprises: (i) a VH comprising a VH CDR1 having an amino acid sequence of SEQ ID NO:121, a VH CDR2 having an amino acid sequence of SEQ ID NO:122, and a VH CDR3 having an amino acid sequence of SEQ ID NO:123; and (ii) a VL comprising a VL CDR1 having an amino acid sequence of SEQ ID NO:124, a VL CDR2 having an amino acid sequence of SEQ ID NO:125, and a VL CDR3 having an amino acid sequence of SEQ ID NO:126. In some embodiments, the first binding domain that binds to Vβ17 comprises: (i) a VH comprising a VH CDR1 having an amino acid sequence of SEQ ID NO:127, a VH CDR2 having an amino acid sequence of SEQ ID NO:128, and a VH CDR3 having an amino acid sequence of SEQ ID NO:129; and (ii) a VL comprising a VL CDR1 having an amino acid sequence of SEQ ID NO:130, a VL CDR2 having an amino acid sequence of SEQ ID NO:131, and a VL CDR3 having an amino acid sequence of SEQ ID NO:132. In some embodiments, the first binding domain that binds to Vβ17 comprises: (i) a VH comprising a VH CDR1 having an amino acid sequence of SEQ ID NO:133, a VH CDR2 having an amino acid sequence of SEQ ID NO:134, and a VH CDR3 having an amino acid sequence of SEQ ID NO:135; and (ii) a VL comprising a VL CDR1 having an amino acid sequence of SEQ ID NO:136, a VL CDR2 having an amino acid sequence of SEQ ID NO:137, and a VL CDR3 having an amino acid sequence of SEQ ID NO:138. In some embodiments, the first binding domain that binds to Vβ17 comprises: (i) a VH comprising a VH CDR1, a VH CDR2, and a VH CDR3 having an amino acid sequence of a VH CDR1, VH CDR2, and VH CDR3, respectively, of SEQ ID NO:25; and (ii) a VL comprising a VL CDR1, a VL CDR2, and a VL CDR3 having an amino acid sequence of a VL CDR1, VL CDR2, and VL CDR3, respectively, of SEQ ID NO:26. In some embodiments, the first binding domain that binds to Vβ17 comprises: (i) a VH comprising a VH CDR1, a VH CDR2, and a VH CDR3 having an amino acid sequence of a VH CDR1, VH CDR2, and VH CDR3, respectively, of SEQ ID NO:7; and (ii) a VL comprising a VL CDR1, a VL CDR2, and a VL CDR3 having an amino acid sequence of a VL CDR1, VL CDR2, and VL CDR3, respectively, of SEQ ID NO:8. In some embodiments, the first binding domain that binds to Vβ17 comprises: (i) a VH comprising a VH CDR1, a VH CDR2, and a VH CDR3 having an amino acid sequence of a VH CDR1, VH CDR2, and VH CDR3, respectively, of SEQ ID NO:9; and (ii) a VL comprising a VL CDR1, a VL CDR2, and a VL CDR3 having an amino acid sequence of a VL CDR1, VL CDR2, and VL CDR3, respectively, of SEQ ID NO:10. In some embodiments, the first binding domain comprises a VH having an amino acid sequence of SEQ ID NO:25. In some embodiments, the first binding domain comprises a VL having an amino acid sequence of SEQ ID NO:26. In some embodiments, the first binding domain comprises a VH having an amino acid sequence of SEQ ID NO:25, and a VL having an amino acid sequence of SEQ ID NO:26. In some embodiments, the first binding domain comprises a heavy chain having an amino acid sequence of SEQ ID NO:7. In some embodiments, the first binding domain comprises a light chain having an amino acid sequence of SEQ ID NO:8. In some embodiments, the first binding domain comprises a heavy chain having an amino acid sequence of SEQ ID NO:7, and a light chain having an amino acid sequence of SEQ ID NO:8. In some embodiments, the first binding domain comprises a heavy chain having an amino acid sequence of SEQ ID NO:9. In some embodiments, the first binding domain comprises a light chain having an amino acid sequence of SEQ ID NO:10. In some embodiments, the first binding domain comprises a heavy chain having an amino acid sequence of SEQ ID NO:9, and a light chain having an amino acid sequence of SEQ ID NO:10. In some embodiments, the first binding domain comprises a VH having an amino acid sequence having at least 95% identity to an amino acid sequence of SEQ ID NO:25. In some embodiments, the first binding domain comprises a VL having an amino acid sequence having at least 95% identity to an amino acid sequence of SEQ ID NO:26. In some embodiments, the first binding domain comprises a VH having an amino acid sequence having at least 95% identity to an amino acid sequence of SEQ ID NO:25, and a VL having an amino acid sequence having at least 95% identity to an amino acid sequence of SEQ ID NO:26. In some embodiments, the first binding domain comprises a heavy chain having an amino acid sequence having at least 95% identity to an amino acid sequence of SEQ ID NO:7. In some embodiments, the first binding domain comprises a light chain having an amino acid sequence having at least 95% identity to an amino acid sequence of SEQ ID NO:8. In some embodiments, the first binding domain comprises a heavy chain having an amino acid sequence having at least 95% identity to an amino acid sequence of SEQ ID NO:7, and a light chain having an amino acid sequence having at least 95% identity to an amino acid sequence of SEQ ID NO:8. In some embodiments, the first binding domain comprises a heavy chain having an amino acid sequence having at least 95% identity to an amino acid sequence of SEQ ID NO:9. In some embodiments, the first binding domain comprises a light chain having an amino acid sequence having at least 95% identity to an amino acid sequence of SEQ ID NO:10. In some embodiments, the first binding domain comprises a heavy chain having an amino acid sequence having at least 95% identity to an amino acid sequence of SEQ ID NO:9, and a light chain having an amino acid sequence having at least 95% identity to an amino acid sequence of SEQ ID NO:10.

[0195] In some embodiments, the first binding domain that binds to Vβ17 comprises: (i) a VH comprising a VH CDR1 having an amino acid sequence of SEQ ID NO:1, a VH CDR2 having an amino acid sequence of SEQ ID NO:2, and a VH CDR3 having an amino acid sequence of SEQ ID NO:3; and (ii) a VL comprising a VL CDR1 having an amino acid sequence of SEQ ID NO:4, a VL CDR2 having an amino acid sequence of SEQ ID NO:5, and a VL CDR3 having an amino acid sequence of SEQ ID NO:6. In some embodiments, the first binding domain that binds to Vβ17 comprises: (i) a VH comprising a VH CDR1 having an amino acid sequence of SEQ ID NO:139, a VH CDR2 having an amino acid sequence of SEQ ID NO:140, and a VH CDR3 having an amino acid sequence of SEQ ID NO:141; and (ii) a VL comprising a VL CDR1 having an amino acid sequence of SEQ ID NO:142, a VL CDR2 having an amino acid sequence of SEQ ID NO:143, and a VL CDR3 having an amino acid sequence of SEQ ID NO:144. In some embodiments, the first binding domain that binds to Vβ17 comprises: (i) a VH comprising a VH CDR1 having an amino acid sequence of SEQ ID NO:145, a VH CDR2 having an amino acid sequence of SEQ ID NO:146, and a VH CDR3 having an amino acid sequence of SEQ ID NO:147; and (ii) a VL comprising a VL CDR1 having an amino acid sequence of SEQ ID NO:148, a VL CDR2 having an amino acid sequence of SEQ ID NO:149, and a VL CDR3 having an amino acid sequence of SEQ ID NO:150. In some embodiments, the first binding domain that binds to Vβ17 comprises: (i) a VH comprising a VH CDR1 having an amino acid sequence of SEQ ID NO:151, a VH CDR2 having an amino acid sequence of SEQ ID NO:152, and a VH CDR3 having an amino acid sequence of SEQ ID NO:153; and (ii) a VL comprising a VL CDR1 having an amino acid sequence of SEQ ID NO:154, a VL CDR2 having an amino acid sequence of SEQ ID NO:155, and a VL CDR3 having an amino acid sequence of SEQ ID NO:156. In some embodiments, the first binding domain that binds to Vβ17 comprises: (i) a VH comprising a VH CDR1 having an amino acid sequence of SEQ ID NO:157, a VH CDR2 having an amino acid sequence of SEQ ID NO:158, and a VH CDR3 having an amino acid sequence of SEQ ID NO:159; and (ii) a VL comprising a VL CDR1 having an amino acid sequence of SEQ ID NO:160, a VL CDR2 having an amino acid sequence of SEQ ID NO:161, and a VL CDR3 having an amino acid sequence of SEQ ID NO:162. In some embodiments, the first binding domain that binds to Vβ17 comprises: (i) a VH comprising a VH CDR1 having an amino acid sequence of SEQ ID NO:163, a VH CDR2 having an amino acid sequence of SEQ ID NO:164, and a VH CDR3 having an amino acid sequence of SEQ ID NO:165; and (ii) a VL comprising a VL CDR1 having an amino acid sequence of SEQ ID NO:166, a VL CDR2 having an amino acid sequence of SEQ ID NO:167, and a VL CDR3 having an amino acid sequence of SEQ ID NO:168. In some embodiments, the first binding domain that binds to Vβ17 comprises: (i) a VH comprising a VH CDR1 having an amino acid sequence of SEQ ID NO:169, a VH CDR2 having an amino acid sequence of SEQ ID NO:170, and a VH CDR3 having an amino acid sequence of SEQ ID NO:171; and (ii) a VL comprising a VL CDR1 having an amino acid sequence of SEQ ID NO:172, a VL CDR2 having an amino acid sequence of SEQ ID NO:173, and a VL CDR3 having an amino acid sequence of SEQ ID NO:174. In some embodiments, the first binding domain that binds to Vβ17 comprises: (i) a VH comprising a VH CDR1 having an amino acid sequence of SEQ ID NO:175, a VH CDR2 having an amino acid sequence of SEQ ID NO:176, and a VH CDR3 having an amino acid sequence of SEQ ID NO:177; and (ii) a VL comprising a VL CDR1 having an amino acid sequence of SEQ ID NO:178, a VL CDR2 having an amino acid sequence of SEQ ID NO:179, and a VL CDR3 having an amino acid sequence of SEQ ID NO:180. In some embodiments, the first binding domain that binds to Vβ17 comprises: (i) a VH comprising a VH CDR1, a VH CDR2, and a VH CDR3 having an amino acid sequence of a VH CDR1, VH CDR2, and VH CDR3, respectively, of SEQ ID NO:19; and (ii) a VL comprising a VL CDR1, a VL CDR2, and a VL CDR3 having an amino acid sequence of a VL CDR1, VL CDR2, and VL CDR3, respectively, of SEQ ID NO:22. In some embodiments, the first binding domain comprises a VH having an amino acid sequence of SEQ ID NO:19. In some embodiments, the first binding domain comprises a VL having an amino acid sequence of SEQ ID NO:22. In some embodiments, the first binding domain comprises a VH having an amino acid sequence of SEQ ID NO:19, and a VL having an amino acid sequence of SEQ ID NO:22. In some embodiments, the first binding domain comprises a VH having an amino acid sequence having at least 95% identity to an amino acid sequence of SEQ ID NO:19. In some embodiments, the first binding domain comprises a VL having an amino acid sequence having at least 95% identity to an amino acid sequence of SEQ ID NO:22. In some embodiments, the first binding domain comprises a VH having an amino acid sequence having at least 95% identity to an amino acid sequence of SEQ ID NO:19, and a VL having an amino acid sequence having at least 95% identity to an amino acid sequence of SEQ ID NO:22.

[0196] In some embodiments, the first binding domain that binds to Vβ17 comprises: (i) a VH comprising a VH CDR1 having an amino acid sequence of SEQ ID NO:1, a VH CDR2 having an amino acid sequence of SEQ ID NO:2, and a VH CDR3 having an amino acid sequence of SEQ ID NO:3; and (ii) a VL comprising a VL CDR1 having an amino acid sequence of SEQ ID NO:4, a VL CDR2 having an amino acid sequence of SEQ ID NO:5, and a VL CDR3 having an amino acid sequence of SEQ ID NO:6. In some embodiments, the first binding domain that binds to Vβ17 comprises: (i) a VH comprising a VH CDR1 having an amino acid sequence of SEQ ID NO:139, a VH CDR2 having an amino acid sequence of SEQ ID NO:140, and a VH CDR3 having an amino acid sequence of SEQ ID NO:141; and (ii) a VL comprising a VL CDR1 having an amino acid sequence of SEQ ID NO:184, a VL CDR2 having an amino acid sequence of SEQ ID NO:185, and a VL CDR3 having an amino acid sequence of SEQ ID NO:186. In some embodiments, the first binding domain that binds to Vβ17 comprises: (i) a VH comprising a VH CDR1 having an amino acid sequence of SEQ ID NO:145, a VH CDR2 having an amino acid sequence of SEQ ID NO:146, and a VH CDR3 having an amino acid sequence of SEQ ID NO:147; and (ii) a VL comprising a VL CDR1 having an amino acid sequence of SEQ ID NO:190, a VL CDR2 having an amino acid sequence of SEQ ID NO:191, and a VL CDR3 having an amino acid sequence of SEQ ID NO:192. In some embodiments, the first binding domain that binds to Vβ17 comprises: (i) a VH comprising a VH CDR1 having an amino acid sequence of SEQ ID NO:151, a VH CDR2 having an amino acid sequence of SEQ ID NO:152, and a VH CDR3 having an amino acid sequence of SEQ ID NO:153; and (ii) a VL comprising a VL CDR1 having an amino acid sequence of SEQ ID NO:196, a VL CDR2 having an amino acid sequence of SEQ ID NO:197, and a VL CDR3 having an amino acid sequence of SEQ ID NO:198. In some embodiments, the first binding domain that binds to Vβ17 comprises: (i) a VH comprising a VH CDR1 having an amino acid sequence of SEQ ID NO:157, a VH CDR2 having an amino acid sequence of SEQ ID NO:158, and a VH CDR3 having an amino acid sequence of SEQ ID NO:159; and (ii) a VL comprising a VL CDR1 having an amino acid sequence of SEQ ID NO:202, a VL CDR2 having an amino acid sequence of SEQ ID NO:203, and a VL CDR3 having an amino acid sequence of SEQ ID NO:204. In some embodiments, the first binding domain that binds to Vβ17 comprises: (i) a VH comprising a VH CDR1 having an amino acid sequence of SEQ ID NO:163, a VH CDR2 having an amino acid sequence of SEQ ID NO:164, and a VH CDR3 having an amino acid sequence of SEQ ID NO:165; and (ii) a VL comprising a VL CDR1 having an amino acid sequence of SEQ ID NO:208, a VL CDR2 having an amino acid sequence of SEQ ID NO:209, and a VL CDR3 having an amino acid sequence of SEQ ID NO:210. In some embodiments, the first binding domain that binds to Vβ17 comprises: (i) a VH comprising a VH CDR1 having an amino acid sequence of SEQ ID NO:169, a VH CDR2 having an amino acid sequence of SEQ ID NO:170, and a VH CDR3 having an amino acid sequence of SEQ ID NO:171; and (ii) a VL comprising a VL CDR1 having an amino acid sequence of SEQ ID NO:214, a VL CDR2 having an amino acid sequence of SEQ ID NO:215, and a VL CDR3 having an amino acid sequence of SEQ ID NO:216. In some embodiments, the first binding domain that binds to Vβ17 comprises: (i) a VH comprising a VH CDR1 having an amino acid sequence of SEQ ID NO:175, a VH CDR2 having an amino acid sequence of SEQ ID NO:176, and a VH CDR3 having an amino acid sequence of SEQ ID NO:177; and (ii) a VL comprising a VL CDR1 having an amino acid sequence of SEQ ID NO:220, a VL CDR2 having an amino acid sequence of SEQ ID NO:221, and a VL CDR3 having an amino acid sequence of SEQ ID NO:222. In some embodiments, the first binding domain that binds to Vβ17 comprises: (i) a VH comprising a VH CDR1, a VH CDR2, and a VH CDR3 having an amino acid sequence of a VH CDR1, VH CDR2, and VH CDR3, respectively, of SEQ ID NO:19; and (ii) a VL comprising a VL CDR1, a VL CDR2, and a VL CDR3 having an amino acid sequence of a VL CDR1, VL CDR2, and VL CDR3, respectively, of SEQ ID NO:23. In some embodiments, the first binding domain comprises a VH having an amino acid sequence of SEQ ID NO:19. In some embodiments, the first binding domain comprises a VL having an amino acid sequence of SEQ ID NO:23. In some embodiments, the first binding domain comprises a VH having an amino acid sequence of SEQ ID NO:19, and a VL having an amino acid sequence of SEQ ID NO:23. In some embodiments, the first binding domain comprises a VH having an amino acid sequence having at least 95% identity to an amino acid sequence of SEQ ID NO:19. In some embodiments, the first binding domain comprises a VL having an amino acid sequence having at least 95% identity to an amino acid sequence of SEQ ID NO:23. In some embodiments, the first binding domain comprises a VH having an amino acid sequence having at least 95% identity to an amino acid sequence of SEQ ID NO:19, and a VL having an amino acid sequence having at least 95% identity to an amino acid sequence of SEQ ID NO:23.

[0197] In some embodiments, the first binding domain that binds to Vβ17 comprises: (i) a VH comprising a VH CDR1 having an amino acid sequence of SEQ ID NO:1, a VH CDR2 having an amino acid sequence of SEQ ID NO:2, and a VH CDR3 having an amino acid sequence of SEQ ID NO:3; and (ii) a VL comprising a VL CDR1 having an amino acid sequence of SEQ ID NO:4, a VL CDR2 having an amino acid sequence of SEQ ID NO:5, and a VL CDR3 having an amino acid sequence of SEQ ID NO:6. In some embodiments, the first binding domain that binds to Vβ17 comprises: (i) a VH comprising a VH CDR1 having an amino acid sequence of SEQ ID NO:139, a VH CDR2 having an amino acid sequence of SEQ ID NO:140, and a VH CDR3 having an amino acid sequence of SEQ ID NO:141; and (ii) a VL comprising a VL CDR1 having an amino acid sequence of SEQ ID NO:226, a VL CDR2 having an amino acid sequence of SEQ ID NO:227, and a VL CDR3 having an amino acid sequence of SEQ ID NO:228. In some embodiments, the first binding domain that binds to Vβ17 comprises: (i) a VH comprising a VH CDR1 having an amino acid sequence of SEQ ID NO:145, a VH CDR2 having an amino acid sequence of SEQ ID NO:146, and a VH CDR3 having an amino acid sequence of SEQ ID NO:147; and (ii) a VL comprising a VL CDR1 having an amino acid sequence of SEQ ID NO:232, a VL CDR2 having an amino acid sequence of SEQ ID NO:233, and a VL CDR3 having an amino acid sequence of SEQ ID NO:234. In some embodiments, the first binding domain that binds to Vβ17 comprises: (i) a VH comprising a VH CDR1 having an amino acid sequence of SEQ ID NO:151, a VH CDR2 having an amino acid sequence of SEQ ID NO:152, and a VH CDR3 having an amino acid sequence of SEQ ID NO:153; and (ii) a VL comprising a VL CDR1 having an amino acid sequence of SEQ ID NO:238, a VL CDR2 having an amino acid sequence of SEQ ID NO:239, and a VL CDR3 having an amino acid sequence of SEQ ID NO:240. In some embodiments, the first binding domain that binds to Vβ17 comprises: (i) a VH comprising a VH CDR1 having an amino acid sequence of SEQ ID NO:157, a VH CDR2 having an amino acid sequence of SEQ ID NO:158, and a VH CDR3 having an amino acid sequence of SEQ ID NO:159; and (ii) a VL comprising a VL CDR1 having an amino acid sequence of SEQ ID NO:244, a VL CDR2 having an amino acid sequence of SEQ ID NO:245, and a VL CDR3 having an amino acid sequence of SEQ ID NO:246. In some embodiments, the first binding domain that binds to Vβ17 comprises: (i) a VH comprising a VH CDR1 having an amino acid sequence of SEQ ID NO:163, a VH CDR2 having an amino acid sequence of SEQ ID NO:164, and a VH CDR3 having an amino acid sequence of SEQ ID NO:165; and (ii) a VL comprising a VL CDR1 having an amino acid sequence of SEQ ID NO:250, a VL CDR2 having an amino acid sequence of SEQ ID NO:251, and a VL CDR3 having an amino acid sequence of SEQ ID NO:252. In some embodiments, the first binding domain that binds to Vβ17 comprises: (i) a VH comprising a VH CDR1 having an amino acid sequence of SEQ ID NO:169, a VH CDR2 having an amino acid sequence of SEQ ID NO:170, and a VH CDR3 having an amino acid sequence of SEQ ID NO:171; and (ii) a VL comprising a VL CDR1 having an amino acid sequence of SEQ ID NO:256, a VL CDR2 having an amino acid sequence of SEQ ID NO:257, and a VL CDR3 having an amino acid sequence of SEQ ID NO:258. In some embodiments, the first binding domain that binds to Vβ17 comprises: (i) a VH comprising a VH CDR1 having an amino acid sequence of SEQ ID NO:175, a VH CDR2 having an amino acid sequence of SEQ ID NO:176, and a VH CDR3 having an amino acid sequence of SEQ ID NO:177; and (ii) a VL comprising a VL CDR1 having an amino acid sequence of SEQ ID NO:262, a VL CDR2 having an amino acid sequence of SEQ ID NO:263, and a VL CDR3 having an amino acid sequence of SEQ ID NO:264. In some embodiments, the first binding domain that binds to Vβ17 comprises: (i) a VH comprising a VH CDR1, a VH CDR2, and a VH CDR3 having an amino acid sequence of a VH CDR1, VH CDR2, and VH CDR3, respectively, of SEQ ID NO:19; and (ii) a VL comprising a VL CDR1, a VL CDR2, and a VL CDR3 having an amino acid sequence of a VL CDR1, VL CDR2, and VL CDR3, respectively, of SEQ ID NO:24. In some embodiments, the first binding domain comprises a VH having an amino acid sequence of SEQ ID NO:19. In some embodiments, the first binding domain comprises a VL having an amino acid sequence of SEQ ID NO:24. In some embodiments, the first binding domain comprises a VH having an amino acid sequence of SEQ ID NO:19, and a VL having a n amino acid sequence of SEQ ID NO:24. In some embodiments, the first binding domain comprises a VH having an amino acid sequence having at least 95% identity to an amino acid sequence of SEQ ID NO:19. In some embodiments, the first binding domain comprises a VL having an amino acid sequence having at least 95% identity to an amino acid sequence of SEQ ID NO:24. In some embodiments, the first binding domain comprises a VH having an amino acid sequence having at least 95% identity to an amino acid sequence of SEQ ID NO:19, and a VL having a n amino acid sequence of SEQ ID NO:24.

[0198] In some embodiments, the first binding domain that binds to Vβ17 comprises: (i) a VH comprising a VH CDR1 having an amino acid sequence of SEQ ID NO:1, a VH CDR2 having an amino acid sequence of SEQ ID NO:2, and a VH CDR3 having an amino acid sequence of SEQ ID NO:3; and (ii) a VL comprising a VL CDR1 having an amino acid sequence of SEQ ID NO:4, a VL CDR2 having an amino acid sequence of SEQ ID NO:5, and a VL CDR3 having an amino acid sequence of SEQ ID NO:6. In some embodiments, the first binding domain that binds to Vβ17 comprises: (i) a VH comprising a VH CDR1 having an amino acid sequence of SEQ ID NO:181, a VH CDR2 having an amino acid sequence of SEQ ID NO:182, and a VH CDR3 having an amino acid sequence of SEQ ID NO:183; and (ii) a VL comprising a VL CDR1 having an amino acid sequence of SEQ ID NO:142, a VL CDR2 having an amino acid sequence of SEQ ID NO:143, and a VL CDR3 having an amino acid sequence of SEQ ID NO:144. In some embodiments, the first binding domain that binds to Vβ17 comprises: (i) a VH comprising a VH CDR1 having an amino acid sequence of SEQ ID NO:187, a VH CDR2 having an amino acid sequence of SEQ ID NO:188, and a VH CDR3 having an amino acid sequence of SEQ ID NO:189; and (ii) a VL comprising a VL CDR1 having an amino acid sequence of SEQ ID NO:148, a VL CDR2 having an amino acid sequence of SEQ ID NO:149, and a VL CDR3 having an amino acid sequence of SEQ ID NO:150. In some embodiments, the first binding domain that binds to Vβ17 comprises: (i) a VH comprising a VH CDR1 having an amino acid sequence of SEQ ID NO:193, a VH CDR2 having an amino acid sequence of SEQ ID NO:194, and a VH CDR3 having an amino acid sequence of SEQ ID NO:195; and (ii) a VL comprising a VL CDR1 having an amino acid sequence of SEQ ID NO:154, a VL CDR2 having an amino acid sequence of SEQ ID NO:155, and a VL CDR3 having an amino acid sequence of SEQ ID NO:156. In some embodiments, the first binding domain that binds to Vβ17 comprises: (i) a VH comprising a VH CDR1 having an amino acid sequence of SEQ ID NO:199, a VH CDR2 having an amino acid sequence of SEQ ID NO:200, and a VH CDR3 having an amino acid sequence of SEQ ID NO:201; and (ii) a VL comprising a VL CDR1 having an amino acid sequence of SEQ ID NO:160, a VL CDR2 having an amino acid sequence of SEQ ID NO:161, and a VL CDR3 having an amino acid sequence of SEQ ID NO:162. In some embodiments, the first binding domain that binds to Vβ17 comprises: (i) a VH comprising a VH CDR1 having an amino acid sequence of SEQ ID NO:205, a VH CDR2 having an amino acid sequence of SEQ ID NO:206, and a VH CDR3 having an amino acid sequence of SEQ ID NO:207; and (ii) a VL comprising a VL CDR1 having an amino acid sequence of SEQ ID NO:166, a VL CDR2 having an amino acid sequence of SEQ ID NO:167, and a VL CDR3 having an amino acid sequence of SEQ ID NO:168. In some embodiments, the first binding domain that binds to Vβ17 comprises: (i) a VH comprising a VH CDR1 having an amino acid sequence of SEQ ID NO:211, a VH CDR2 having an amino acid sequence of SEQ ID NO:212, and a VH CDR3 having an amino acid sequence of SEQ ID NO:213; and (ii) a VL comprising a VL CDR1 having an amino acid sequence of SEQ ID NO:172, a VL CDR2 having an amino acid sequence of SEQ ID NO:173, and a VL CDR3 having an amino acid sequence of SEQ ID NO:174. In some embodiments, the first binding domain that binds to Vβ17 comprises: (i) a VH comprising a VH CDR1 having an amino acid sequence of SEQ ID NO:217, a VH CDR2 having an amino acid sequence of SEQ ID NO:218, and a VH CDR3 having an amino acid sequence of SEQ ID NO:219 and (ii) a VL comprising a VL CDR1 having an amino acid sequence of SEQ ID NO:178, a VL CDR2 having an amino acid sequence of SEQ ID NO:179, and a VL CDR3 having an amino acid sequence of SEQ ID NO:180. In some embodiments, the first binding domain that binds to Vβ17 comprises: (i) a VH comprising a VH CDR1, a VH CDR2, and a VH CDR3 having an amino acid sequence of a VH CDR1, VH CDR2, and VH CDR3, respectively, of SEQ ID NO:20; and (ii) a VL comprising a VL CDR1, a VL CDR2, and a VL CDR3 having an amino acid sequence of a VL CDR1, VL CDR2, and VL CDR3, respectively, of SEQ ID NO:22. In some embodiments, the first binding domain comprises a VH having an amino acid sequence of SEQ ID NO:20. In some embodiments, the first binding domain comprises a VL having an amino acid sequence of SEQ ID NO:22. In some embodiments, the first binding domain comprises a VH having an amino acid sequence of SEQ ID NO:20, and a VL having an amino acid sequence of SEQ ID NO:22. In some embodiments, the first binding domain comprises a VH having an amino acid sequence having at least 95% identity to an amino acid sequence of SEQ ID NO:20. In some embodiments, the first binding domain comprises a VL having an amino acid sequence having at least 95% identity to an amino acid sequence of SEQ ID NO:22. In some embodiments, the first binding domain comprises a VH having an amino acid sequence having at least 95% identity to an amino acid sequence of SEQ ID NO:20, and a VL having an amino acid sequence having at least 95% identity to an amino acid sequence of SEQ ID NO:22.

[0199] In some embodiments, the first binding domain that binds to Vβ17 comprises: (i) a VH comprising a VH CDR1 having an amino acid sequence of SEQ ID NO:1, a VH CDR2 having an amino acid sequence of SEQ ID NO:2, and a VH CDR3 having an amino acid sequence of SEQ ID NO:3; and (ii) a VL comprising a VL CDR1 having an amino acid sequence of SEQ ID NO:4, a VL CDR2 having an amino acid sequence of SEQ ID NO:5, and a VL CDR3 having an amino acid sequence of SEQ ID NO:6. In some embodiments, the first binding domain that binds to Vβ17 comprises: (i) a VH comprising a VH CDR1 having an amino acid sequence of SEQ ID NO:181, a VH CDR2 having an amino acid sequence of SEQ ID NO:182, and a VH CDR3 having an amino acid sequence of SEQ ID NO:183; and (ii) a VL comprising a VL CDR1 having an amino acid sequence of SEQ ID NO:184, a VL CDR2 having an amino acid sequence of SEQ ID NO:185, and a VL CDR3 having an amino acid sequence of SEQ ID NO:186. In some embodiments, the first binding domain that binds to Vβ17 comprises: (i) a VH comprising a VH CDR1 having an amino acid sequence of SEQ ID NO:187, a VH CDR2 having an amino acid sequence of SEQ ID NO:188, and a VH CDR3 having an amino acid sequence of SEQ ID NO:189; and (ii) a VL comprising a VL CDR1 having an amino acid sequence of SEQ ID NO:190, a VL CDR2 having an amino acid sequence of SEQ ID NO:191, and a VL CDR3 having an amino acid sequence of SEQ ID NO:192. In some embodiments, the first binding domain that binds to Vβ17 comprises: (i) a VH comprising a VH CDR1 having an amino acid sequence of SEQ ID NO:193, a VH CDR2 having an amino acid sequence of SEQ ID NO:194, and a VH CDR3 having an amino acid sequence of SEQ ID NO:195; and (ii) a VL comprising a VL CDR1 having an amino acid sequence of SEQ ID NO:196, a VL CDR2 having an amino acid sequence of SEQ ID NO:197, and a VL CDR3 having an amino acid sequence of SEQ ID NO:198. In some embodiments, the first binding domain that binds to Vβ17 comprises: (i) a VH comprising a VH CDR1 having an amino acid sequence of SEQ ID NO:199, a VH CDR2 having an amino acid sequence of SEQ ID NO:200, and a VH CDR3 having an amino acid sequence of SEQ ID NO:201; and (ii) a VL comprising a VL CDR1 having an amino acid sequence of SEQ ID NO:202, a VL CDR2 having an amino acid sequence of SEQ ID NO:203, and a VL CDR3 having an amino acid sequence of SEQ ID NO:204. In some embodiments, the first binding domain that binds to Vβ17 comprises: (i) a VH comprising a VH CDR1 having an amino acid sequence of SEQ ID NO:205, a VH CDR2 having an amino acid sequence of SEQ ID NO:206, and a VH CDR3 having an amino acid sequence of SEQ ID NO:207; and (ii) a VL comprising a VL CDR1 having an amino acid sequence of SEQ ID NO:208, a VL CDR2 having an amino acid sequence of SEQ ID NO:209, and a VL CDR3 having an amino acid sequence of SEQ ID NO:210. In some embodiments, the first binding domain that binds to Vβ17 comprises: (i) a VH comprising a VH CDR1 having an amino acid sequence of SEQ ID NO:211, a VH CDR2 having an amino acid sequence of SEQ ID NO:212, and a VH CDR3 having an amino acid sequence of SEQ ID NO:213; and (ii) a VL comprising a VL CDR1 having an amino acid sequence of SEQ ID NO:214, a VL CDR2 having an amino acid sequence of SEQ ID NO:215, and a VL CDR3 having an amino acid sequence of SEQ ID NO:216. In some embodiments, the first binding domain that binds to Vβ17 comprises: (i) a VH comprising a VH CDR1 having an amino acid sequence of SEQ ID NO:217, a VH CDR2 having an amino acid sequence of SEQ ID NO:218, and a VH CDR3 having an amino acid sequence of SEQ ID NO:219; and (ii) a VL comprising a VL CDR1 having an amino acid sequence of SEQ ID NO:220, a VL CDR2 having an amino acid sequence of SEQ ID NO:221, and a VL CDR3 having an amino acid sequence of SEQ ID NO:222. In some embodiments, the first binding domain that binds to Vβ17 comprises: (i) a VH comprising a VH CDR1, a VH CDR2, and a VH CDR3 having an amino acid sequence of a VH CDR1, VH CDR2, and VH CDR3, respectively, of SEQ ID NO:20; and (ii) a VL comprising a VL CDR1, a VL CDR2, and a VL CDR3 having an amino acid sequence of a VL CDR1, VL CDR2, and VL CDR3, respectively, of SEQ ID NO:23. In some embodiments, the first binding domain comprises a VH having an amino acid sequence of SEQ ID NO:20. In some embodiments, the first binding domain comprises a VL having an amino acid sequence of SEQ ID NO:23. In some embodiments, the first binding domain comprises a VH having an amino acid sequence of SEQ ID NO:20, and a VL having an amino acid sequence of SEQ ID NO:23. In some embodiments, the first binding domain comprises a VH having an amino acid sequence having at least 95% identity to an amino acid sequence of SEQ ID NO:20. In some embodiments, the first binding domain comprises a VL having an amino acid sequence having at least 95% identity to an amino acid sequence of SEQ ID NO:23. In some embodiments, the first binding domain comprises a VH having an amino acid sequence having at least 95% identity to an amino acid sequence of SEQ ID NO:20, and a VL having an amino acid sequence having at least 95% identity to an amino acid sequence of SEQ ID NO:23.

[0200] In some embodiments, the first binding domain that binds to Vβ17 comprises: (i) a VH comprising a VH CDR1 having an amino acid sequence of SEQ ID NO:1, a VH CDR2 having an amino acid sequence of SEQ ID NO:2, and a VH CDR3 having an amino acid sequence of SEQ ID NO:3 and (ii) a VL comprising a VL CDR1 having an amino acid sequence of SEQ ID NO:4, a VL CDR2 having an amino acid sequence of SEQ ID NO:5, and a VL CDR3 having an amino acid sequence of SEQ ID NO:6. In some embodiments, the first binding domain that binds to Vβ17 comprises: (i) a VH comprising a VH CDR1 having an amino acid sequence of SEQ ID NO:181, a VH CDR2 having an amino acid sequence of SEQ ID NO:182, and a VH CDR3 having an amino acid sequence of SEQ ID NO:183; and (ii) a VL comprising a VL CDR1 having an amino acid sequence of SEQ ID NO:226, a VL CDR2 having an amino acid sequence of SEQ ID NO:227, and a VL CDR3 having an amino acid sequence of SEQ ID NO:228. In some embodiments, the first binding domain that binds to Vβ17 comprises: (i) a VH comprising a VH CDR1 having an amino acid sequence of SEQ ID NO:187, a VH CDR2 having an amino acid sequence of SEQ ID NO:188, and a VH CDR3 having an amino acid sequence of SEQ ID NO:189; and (ii) a VL comprising a VL CDR1 having an amino acid sequence of SEQ ID NO:232, a VL CDR2 having an amino acid sequence of SEQ ID NO:233, and a VL CDR3 having an amino acid sequence of SEQ ID NO:234. In some embodiments, the first binding domain that binds to Vβ17 comprises: (i) a VH comprising a VH CDR1 having an amino acid sequence of SEQ ID NO:193, a VH CDR2 having an amino acid sequence of SEQ ID NO:194, and a VH CDR3 having an amino acid sequence of SEQ ID NO:195; and (ii) a VL comprising a VL CDR1 having an amino acid sequence of SEQ ID NO:238, a VL CDR2 having an amino acid sequence of SEQ ID NO:239, and a VL CDR3 having an amino acid sequence of SEQ ID NO:240. In some embodiments, the first binding domain that binds to Vβ17 comprises: (i) a VH comprising a VH CDR1 having an amino acid sequence of SEQ ID NO:199, a VH CDR2 having an amino acid sequence of SEQ ID NO:200, and a VH CDR3 having an amino acid sequence of SEQ ID NO:201; and (ii) a VL comprising a VL CDR1 having an amino acid sequence of SEQ ID NO:244, a VL CDR2 having an amino acid sequence of SEQ ID NO:245, and a VL CDR3 having an amino acid sequence of SEQ ID NO:246. In some embodiments, the first binding domain that binds to Vβ17 comprises: (i) a VH comprising a VH CDR1 having an amino acid sequence of SEQ ID NO:205, a VH CDR2 having an amino acid sequence of SEQ ID NO:206, and a VH CDR3 having an amino acid sequence of SEQ ID NO:207; and (ii) a VL comprising a VL CDR1 having an amino acid sequence of SEQ ID NO:250, a VL CDR2 having an amino acid sequence of SEQ ID NO:251, and a VL CDR3 having an amino acid sequence of SEQ ID NO:252. In some embodiments, the first binding domain that binds to Vβ17 comprises: (i) a VH comprising a VH CDR1 having an amino acid sequence of SEQ ID NO:211, a VH CDR2 having an amino acid sequence of SEQ ID NO:212, and a VH CDR3 having an amino acid sequence of SEQ ID NO:213; and (ii) a VL comprising a VL CDR1 having an amino acid sequence of SEQ ID NO:256, a VL CDR2 having an amino acid sequence of SEQ ID NO:257, and a VL CDR3 having an amino acid sequence of SEQ ID NO:258. In some embodiments, the first binding domain that binds to Vβ17 comprises: (i) a VH comprising a VH CDR1 having an amino acid sequence of SEQ ID NO:217, a VH CDR2 having an amino acid sequence of SEQ ID NO:218, and a VH CDR3 having an amino acid sequence of SEQ ID NO:219; and (ii) a VL comprising a VL CDR1 having an amino acid sequence of SEQ ID NO:262, a VL CDR2 having an amino acid sequence of SEQ ID NO:263, and a VL CDR3 having an amino acid sequence of SEQ ID NO:264. In some embodiments, the first binding domain that binds to Vβ17 comprises: (i) a VH comprising a VH CDR1, a VH CDR2, and a VH CDR3 having an amino acid sequence of a VH CDR1, VH CDR2, and VH CDR3, respectively, of SEQ ID NO:20; and (ii) a VL comprising a VL CDR1, a VL CDR2, and a VL CDR3 having an amino acid sequence of a VL CDR1, VL CDR2, and VL CDR3, respectively, of SEQ ID NO:24. In some embodiments, the first binding domain comprises a VH having an amino acid sequence of SEQ ID NO:20. In some embodiments, the first binding domain comprises a VL having an amino acid sequence of SEQ ID NO:24. In some embodiments, the first binding domain comprises a VH having an amino acid sequence of SEQ ID NO:20, and a VL having an amino acid sequence of SEQ ID NO:24. In some embodiments, the first binding domain comprises a VH having an amino acid sequence having at least 95% identity to an amino acid sequence of SEQ ID NO:20. In some embodiments, the first binding domain comprises a VL having an amino acid sequence having at least 95% identity to an amino acid sequence of SEQ ID NO:24. In some embodiments, the first binding domain comprises a VH having an amino acid sequence having at least 95% identity to an amino acid sequence of SEQ ID NO:20, and a VL having an amino acid sequence having at least 95% identity to an amino acid sequence of SEQ ID NO:24.

[0201] In some embodiments, the first binding domain that binds to Vβ17 comprises: (i) a VH comprising a VH CDR1 having an amino acid sequence of SEQ ID NO:1, a VH CDR2 having an amino acid sequence of SEQ ID NO:2, and a VH CDR3 having an amino acid sequence of SEQ ID NO:3; and (ii) a VL comprising a VL CDR1 having an amino acid sequence of SEQ ID NO:4, a VL CDR2 having an amino acid sequence of SEQ ID NO:5, and a VL CDR3 having an amino acid sequence of SEQ ID NO:6. In some embodiments, the first binding domain that binds to Vβ17 comprises: (i) a VH comprising a VH CDR1 having an amino acid sequence of SEQ ID NO:223, a VH CDR2 having an amino acid sequence of SEQ ID NO:224, and a VH CDR3 having an amino acid sequence of SEQ ID NO:225; and (ii) a VL comprising a VL CDR1 having an amino acid sequence of SEQ ID NO:142, a VL CDR2 having an amino acid sequence of SEQ ID NO:143, and a VL CDR3 having an amino acid sequence of SEQ ID NO:144. In some embodiments, the first binding domain that binds to Vβ17 comprises: (i) a VH comprising a VH CDR1 having an amino acid sequence of SEQ ID NO:229, a VH CDR2 having an amino acid sequence of SEQ ID NO:230, and a VH CDR3 having an amino acid sequence of SEQ ID NO:231; and (ii) a VL comprising a VL CDR1 having an amino acid sequence of SEQ ID NO:148, a VL CDR2 having an amino acid sequence of SEQ ID NO:149, and a VL CDR3 having an amino acid sequence of SEQ ID NO:150. In some embodiments, the first binding domain that binds to Vβ17 comprises: (i) a VH comprising a VH CDR1 having an amino acid sequence of SEQ ID NO:235, a VH CDR2 having an amino acid sequence of SEQ ID NO:236, and a VH CDR3 having an amino acid sequence of SEQ ID NO:237; and (ii) a VL comprising a VL CDR1 having an amino acid sequence of SEQ ID NO:154, a VL CDR2 having an amino acid sequence of SEQ ID NO:155, and a VL CDR3 having an amino acid sequence of SEQ ID NO:156. In some embodiments, the first binding domain that binds to Vβ17 comprises: (i) a VH comprising a VH CDR1 having an amino acid sequence of SEQ ID NO:241, a VH CDR2 having an amino acid sequence of SEQ ID NO:242, and a VH CDR3 having an amino acid sequence of SEQ ID NO:243; and (ii) a VL comprising a VL CDR1 having an amino acid sequence of SEQ ID NO:160, a VL CDR2 having an amino acid sequence of SEQ ID NO:161, and a VL CDR3 having an amino acid sequence of SEQ ID NO:162. In some embodiments, the first binding domain that binds to Vβ17 comprises: (i) a VH comprising a VH CDR1 having an amino acid sequence of SEQ ID NO:247, a VH CDR2 having an amino acid sequence of SEQ ID NO:248, and a VH CDR3 having an amino acid sequence of SEQ ID NO:249; and (ii) a VL comprising a VL CDR1 having an amino acid sequence of SEQ ID NO:166, a VL CDR2 having an amino acid sequence of SEQ ID NO:167, and a VL CDR3 having an amino acid sequence of SEQ ID NO:168. In some embodiments, the first binding domain that binds to Vβ17 comprises: (i) a VH comprising a VH CDR1 having an amino acid sequence of SEQ ID NO:253, a VH CDR2 having an amino acid sequence of SEQ ID NO:254, and a VH CDR3 having an amino acid sequence of SEQ ID NO:255; and (ii) a VL comprising a VL CDR1 having an amino acid sequence of SEQ ID NO:172, a VL CDR2 having an amino acid sequence of SEQ ID NO:173, and a VL CDR3 having an amino acid sequence of SEQ ID NO:174. In some embodiments, the first binding domain that binds to Vβ17 comprises: (i) a VH comprising a VH CDR1 having an amino acid sequence of SEQ ID NO:259, a VH CDR2 having an amino acid sequence of SEQ ID NO:260, and a VH CDR3 having an amino acid sequence of SEQ ID NO:261; and (ii) a VL comprising a VL CDR1 having an amino acid sequence of SEQ ID NO:178, a VL CDR2 having an amino acid sequence of SEQ ID NO:179, and a VL CDR3 having an amino acid sequence of SEQ ID NO:180. In some embodiments, the first binding domain that binds to Vβ17 comprises: (i) a VH comprising a VH CDR1, a VH CDR2, and a VH CDR3 having an amino acid sequence of a VH CDR1, VH CDR2, and VH CDR3, respectively, of SEQ ID NO:21; and (ii) a VL comprising a VL CDR1, a VL CDR2, and a VL CDR3 having an amino acid sequence of a VL CDR1, VL CDR2, and VL CDR3, respectively, of SEQ ID NO:22. In some embodiments, the first binding domain comprises a VH having an amino acid sequence of SEQ ID NO:21. In some embodiments, the first binding domain comprises a VL having an amino acid sequence of SEQ ID NO:22. In some embodiments, the first binding domain comprises a VH having an amino acid sequence of SEQ ID NO:21, and a VL having an amino acid sequence of SEQ ID NO:22. In some embodiments, the first binding domain comprises a VH having an amino acid sequence having at least 95% identity to an amino acid sequence of SEQ ID NO:21. In some embodiments, the first binding domain comprises a VL having an amino acid sequence having at least 95% identity to an amino acid sequence of SEQ ID NO:22. In some embodiments, the first binding domain comprises a VH having an amino acid sequence having at least 95% identity to an amino acid sequence of SEQ ID NO:21, and a VL having an amino acid sequence having at least 95% identity to an amino acid sequence of SEQ ID NO:22.

[0202] In some embodiments, the first binding domain that binds to Vβ17 comprises: (i) a VH comprising a VH CDR1 having an amino acid sequence of SEQ ID NO:1, a VH CDR2 having an amino acid sequence of SEQ ID NO:2, and a VH CDR3 having an amino acid sequence of SEQ ID NO:3; and (ii) a VL comprising a VL CDR1 having an amino acid sequence of SEQ ID NO:4, a VL CDR2 having an amino acid sequence of SEQ ID NO:5, and a VL CDR3 having an amino acid sequence of SEQ ID NO:6. In some embodiments, the first binding domain that binds to Vβ17 comprises: (i) a VH comprising a VH CDR1 having an amino acid sequence of SEQ ID NO:223, a VH CDR2 having an amino acid sequence of SEQ ID NO:224, and a VH CDR3 having an amino acid sequence of SEQ ID NO:225; and (ii) a VL comprising a VL CDR1 having an amino acid sequence of SEQ ID NO:184, a VL CDR2 having an amino acid sequence of SEQ ID NO:185, and a VL CDR3 having an amino acid sequence of SEQ ID NO:186. In some embodiments, the first binding domain that binds to Vβ17 comprises: (i) a VH comprising a VH CDR1 having an amino acid sequence of SEQ ID NO:229, a VH CDR2 having an amino acid sequence of SEQ ID NO:230, and a VH CDR3 having an amino acid sequence of SEQ ID NO:231; and (ii) a VL comprising a VL CDR1 having an amino acid sequence of SEQ ID NO:190, a VL CDR2 having an amino acid sequence of SEQ ID NO:191, and a VL CDR3 having an amino acid sequence of SEQ ID NO:192. In some embodiments, the first binding domain that binds to Vβ17 comprises: (i) a VH comprising a VH CDR1 having an amino acid sequence of SEQ ID NO:235, a VH CDR2 having an amino acid sequence of SEQ ID NO:236, and a VH CDR3 having an amino acid sequence of SEQ ID NO:237; and (ii) a VL comprising a VL CDR1 having an amino acid sequence of SEQ ID NO:196, a VL CDR2 having an amino acid sequence of SEQ ID NO:197, and a VL CDR3 having an amino acid sequence of SEQ ID NO:198. In some embodiments, the first binding domain that binds to Vβ17 comprises: (i) a VH comprising a VH CDR1 having an amino acid sequence of SEQ ID NO:241, a VH CDR2 having an amino acid sequence of SEQ ID NO:242, and a VH CDR3 having an amino acid sequence of SEQ ID NO:243; and (ii) a VL comprising a VL CDR1 having an amino acid sequence of SEQ ID NO:202, a VL CDR2 having an amino acid sequence of SEQ ID NO:203, and a VL CDR3 having an amino acid sequence of SEQ ID NO:204. In some embodiments, the first binding domain that binds to Vβ17 comprises: (i) a VH comprising a VH CDR1 having an amino acid sequence of SEQ ID NO:247, a VH CDR2 having an amino acid sequence of SEQ ID NO:248, and a VH CDR3 having an amino acid sequence of SEQ ID NO:249; and (ii) a VL comprising a VL CDR1 having an amino acid sequence of SEQ ID NO:208, a VL CDR2 having an amino acid sequence of SEQ ID NO:209, and a VL CDR3 having an amino acid sequence of SEQ ID NO:210. In some embodiments, the first binding domain that binds to Vβ17 comprises: (i) a VH comprising a VH CDR1 having an amino acid sequence of SEQ ID NO:253, a VH CDR2 having an amino acid sequence of SEQ ID NO:254, and a VH CDR3 having an amino acid sequence of SEQ ID NO:255; and (ii) a VL comprising a VL CDR1 having an amino acid sequence of SEQ ID NO:214, a VL CDR2 having an amino acid sequence of SEQ ID NO:215, and a VL CDR3 having an amino acid sequence of SEQ ID NO:216. In some embodiments, the first binding domain that binds to Vβ17 comprises: (i) a VH comprising a VH CDR1 having an amino acid sequence of SEQ ID NO:259, a VH CDR2 having an amino acid sequence of SEQ ID NO:260, and a VH CDR3 having an amino acid sequence of SEQ ID NO:261; and (ii) a VL comprising a VL CDR1 having an amino acid sequence of SEQ ID NO:220, a VL CDR2 having an amino acid sequence of SEQ ID NO:221, and a VL CDR3 having an amino acid sequence of SEQ ID NO:222. In some embodiments, the first binding domain that binds to Vβ17 comprises: (i) a VH comprising a VH CDR1, a VH CDR2, and a VH CDR3 having an amino acid sequence of a VH CDR1, VH CDR2, and VH CDR3, respectively, of SEQ ID NO:21; and (ii) a VL comprising a VL CDR1, a VL CDR2, and a VL CDR3 having an amino acid sequence of a VL CDR1, VL CDR2, and VL CDR3, respectively, of SEQ ID NO:23. In some embodiments, the first binding domain comprises a VH having an amino acid sequence of SEQ ID NO:21. In some embodiments, the first binding domain comprises a VL having an amino acid sequence of SEQ ID NO:23. In some embodiments, the first binding domain comprises a VH having an amino acid sequence of SEQ ID NO:21, and a VL having an amino acid sequence of SEQ ID NO:23. In some embodiments, the first binding domain comprises a VH having an amino acid sequence having at least 95% identity to an amino acid sequence of SEQ ID NO:21. In some embodiments, the first binding domain comprises a VL having an amino acid sequence having at least 95% identity to an amino acid sequence of SEQ ID NO:23. In some embodiments, the first binding domain comprises a VH having an amino acid sequence having at least 95% identity to an amino acid sequence of SEQ ID NO:21, and a VL having an amino acid sequence having at least 95% identity to an amino acid sequence of SEQ ID NO:23.

[0203] In some embodiments, the first binding domain that binds to Vβ17 comprises: (i) a VH comprising a VH CDR1 having an amino acid sequence of SEQ ID NO:1, a VH CDR2 having an amino acid sequence of SEQ ID NO:2, and a VH CDR3 having an amino acid sequence of SEQ ID NO:3; and (ii) a VL comprising a VL CDR1 having an amino acid sequence of SEQ ID NO:4, a VL CDR2 having an amino acid sequence of SEQ ID NO:5, and a VL CDR3 having an amino acid sequence of SEQ ID NO:6. In some embodiments, the first binding domain that binds to Vβ17 comprises: (i) a VH comprising a VH CDR1 having an amino acid sequence of SEQ ID NO:223, a VH CDR2 having an amino acid sequence of SEQ ID NO:224, and a VH CDR3 having an amino acid sequence of SEQ ID NO:225; and (ii) a VL comprising a VL CDR1 having an amino acid sequence of SEQ ID NO:226, a VL CDR2 having an amino acid sequence of SEQ ID NO:227, and a VL CDR3 having an amino acid sequence of SEQ ID NO:228. In some embodiments, the first binding domain that binds to Vβ17 comprises: (i) a VH comprising a VH CDR1 having an amino acid sequence of SEQ ID NO:229, a VH CDR2 having an amino acid sequence of SEQ ID NO:230, and a VH CDR3 having an amino acid sequence of SEQ ID NO:231; and (ii) a VL comprising a VL CDR1 having an amino acid sequence of SEQ ID NO:232, a VL CDR2 having an amino acid sequence of SEQ ID NO:233, and a VL CDR3 having an amino acid sequence of SEQ ID NO:234. In some embodiments, the first binding domain that binds to Vβ17 comprises: (i) a VH comprising a VH CDR1 having an amino acid sequence of SEQ ID NO:235, a VH CDR2 having an amino acid sequence of SEQ ID NO:236, and a VH CDR3 having an amino acid sequence of SEQ ID NO:237; and (ii) a VL comprising a VL CDR1 having an amino acid sequence of SEQ ID NO:238, a VL CDR2 having an amino acid sequence of SEQ ID NO:239, and a VL CDR3 having an amino acid sequence of SEQ ID NO:240. In some embodiments, the first binding domain that binds to Vβ17 comprises: (i) a VH comprising a VH CDR1 having an amino acid sequence of SEQ ID NO:241, a VH CDR2 having an amino acid sequence of SEQ ID NO:242, and a VH CDR3 having an amino acid sequence of SEQ ID NO:243; and (ii) a VL comprising a VL CDR1 having an amino acid sequence of SEQ ID NO:244, a VL CDR2 having an amino acid sequence of SEQ ID NO:245, and a VL CDR3 having an amino acid sequence of SEQ ID NO:246. In some embodiments, the first binding domain that binds to Vβ17 comprises: (i) a VH comprising a VH CDR1 having an amino acid sequence of SEQ ID NO:247, a VH CDR2 having an amino acid sequence of SEQ ID NO:248, and a VH CDR3 having an amino acid sequence of SEQ ID NO:249; and (ii) a VL comprising a VL CDR1 having an amino acid sequence of SEQ ID NO:250, a VL CDR2 having an amino acid sequence of SEQ ID NO:251, and a VL CDR3 having an amino acid sequence of SEQ ID NO:252. In some embodiments, the first binding domain that binds to Vβ17 comprises: (i) a VH comprising a VH CDR1 having an amino acid sequence of SEQ ID NO:253, a VH CDR2 having an amino acid sequence of SEQ ID NO:254, and a VH CDR3 having an amino acid sequence of SEQ ID NO:255; and (ii) a VL comprising a VL CDR1 having an amino acid sequence of SEQ ID NO:256, a VL CDR2 having an amino acid sequence of SEQ ID NO:257, and a VL CDR3 having an amino acid sequence of SEQ ID NO:258. In some embodiments, the first binding domain that binds to Vβ17 comprises: (i) a VH comprising a VH CDR1 having an amino acid sequence of SEQ ID NO:259, a VH CDR2 having an amino acid sequence of SEQ ID NO:260, and a VH CDR3 having an amino acid sequence of SEQ ID NO:261; and (ii) a VL comprising a VL CDR1 having an amino acid sequence of SEQ ID NO:262, a VL CDR2 having an amino acid sequence of SEQ ID NO:263, and a VL CDR3 having an amino acid sequence of SEQ ID NO:264. In some embodiments, the first binding domain that binds to Vβ17 comprises: (i) a VH comprising a VH CDR1, a VH CDR2, and a VH CDR3 having an amino acid sequence of a VH CDR1, VH CDR2, and VH CDR3, respectively, of SEQ ID NO:21; and (ii) a VL comprising a VL CDR1, a VL CDR2, and a VL CDR3 having an amino acid sequence of a VL CDR1, VL CDR2, and VL CDR3, respectively, of SEQ ID NO:24. In some embodiments, the first binding domain comprises a VH having an amino acid sequence of SEQ ID NO:21. In some embodiments, the first binding domain comprises a VL having an amino acid sequence of SEQ ID NO:24. In some embodiments, the first binding domain comprises a VH having an amino acid sequence of SEQ ID NO:21, and a VL having an amino acid sequence of SEQ ID NO:24. In some embodiments, the first binding domain comprises a VH having an amino acid sequence having at least 95% identity to an amino acid sequence of SEQ ID NO:21. In some embodiments, the first binding domain comprises a VL having an amino acid sequence having at least 95% identity to an amino acid sequence of SEQ ID NO:24. In some embodiments, the first binding domain comprises a VH having an amino acid sequence having at least 95% identity to an amino acid sequence of SEQ ID NO:21, and a VL having an amino acid sequence having at least 95% identity to an amino acid sequence of SEQ ID NO:24.

[0204] In some embodiments, the first binding domain that binds to Vβ17 comprises: (i) a VH comprising a VH CDR1 having an amino acid sequence of SEQ ID NO:45, a VH CDR2 having an amino acid sequence of SEQ ID NO:2, and a VH CDR3 having an amino acid sequence of SEQ ID NO:3; and (ii) a VL comprising a VL CDR1 having an amino acid sequence of SEQ ID NO:4, a VL CDR2 having an amino acid sequence of SEQ ID NO:5, and a VL CDR3 having an amino acid sequence of SEQ ID NO:6. In some embodiments, the first binding domain that binds to Vβ17 comprises: (i) a VH comprising a VH CDR1 having an amino acid sequence of SEQ ID NO:265, a VH CDR2 having an amino acid sequence of SEQ ID NO:266, and a VH CDR3 having an amino acid sequence of SEQ ID NO:267; and (ii) a VL comprising a VL CDR1 having an amino acid sequence of SEQ ID NO:268, a VL CDR2 having an amino acid sequence of SEQ ID NO:269, and a VL CDR3 having an amino acid sequence of SEQ ID NO:270. In some embodiments, the first binding domain that binds to Vβ17 comprises: (i) a VH comprising a VH CDR1 having an amino acid sequence of SEQ ID NO:271, a VH CDR2 having an amino acid sequence of SEQ ID NO:272, and a VH CDR3 having an amino acid sequence of SEQ ID NO:273; and (ii) a VL comprising a VL CDR1 having an amino acid sequence of SEQ ID NO:274, a VL CDR2 having an amino acid sequence of SEQ ID NO:275, and a VL CDR3 having an amino acid sequence of SEQ ID NO:276. In some embodiments, the first binding domain that binds to Vβ17 comprises: (i) a VH comprising a VH CDR1 having an amino acid sequence of SEQ ID NO:277, a VH CDR2 having an amino acid sequence of SEQ ID NO:278, and a VH CDR3 having an amino acid sequence of SEQ ID NO:279; and (ii) a VL comprising a VL CDR1 having an amino acid sequence of SEQ ID NO:280, a VL CDR2 having an amino acid sequence of SEQ ID NO:281, and a VL CDR3 having an amino acid sequence of SEQ ID NO:282. In some embodiments, the first binding domain that binds to Vβ17 comprises: (i) a VH comprising a VH CDR1 having an amino acid sequence of SEQ ID NO:283, a VH CDR2 having an amino acid sequence of SEQ ID NO:284, and a VH CDR3 having an amino acid sequence of SEQ ID NO:285; and (ii) a VL comprising a VL CDR1 having an amino acid sequence of SEQ ID NO:286, a VL CDR2 having an amino acid sequence of SEQ ID NO:287, and a VL CDR3 having an amino acid sequence of SEQ ID NO:288. In some embodiments, the first binding domain that binds to Vβ17 comprises: (i) a VH comprising a VH CDR1 having an amino acid sequence of SEQ ID NO:289, a VH CDR2 having an amino acid sequence of SEQ ID NO:290, and a VH CDR3 having an amino acid sequence of SEQ ID NO:291; and (ii) a VL comprising a VL CDR1 having an amino acid sequence of SEQ ID NO:292, a VL CDR2 having an amino acid sequence of SEQ ID NO:293, and a VL CDR3 having an amino acid sequence of SEQ ID NO:294. In some embodiments, the first binding domain that binds to Vβ17 comprises: (i) a VH comprising a VH CDR1 having an amino acid sequence of SEQ ID NO:295, a VH CDR2 having an amino acid sequence of SEQ ID NO:296, and a VH CDR3 having an amino acid sequence of SEQ ID NO:297; and (ii) a VL comprising a VL CDR1 having an amino acid sequence of SEQ ID NO:298, a VL CDR2 having an amino acid sequence of SEQ ID NO:299, and a VL CDR3 having an amino acid sequence of SEQ ID NO:300. In some embodiments, the first binding domain that binds to Vβ17 comprises: (i) a VH comprising a VH CDR1 having an amino acid sequence of SEQ ID NO:301, a VH CDR2 having an amino acid sequence of SEQ ID NO:302, and a VH CDR3 having an amino acid sequence of SEQ ID NO:303; and (ii) a VL comprising a VL CDR1 having an amino acid sequence of SEQ ID NO:304, a VL CDR2 having an amino acid sequence of SEQ ID NO:305, and a VL CDR3 having an amino acid sequence of SEQ ID NO:306. In some embodiments, the first binding domain that binds to Vβ17 comprises: (i) a VH comprising a VH CDR1, a VH CDR2, and a VH CDR3 having an amino acid sequence of a VH CDR1, VH CDR2, and VH CDR3, respectively, of SEQ ID NO:46; and (ii) a VL comprising a VL CDR1, a VL CDR2, and a VL CDR3 having an amino acid sequence of a VL CDR1, VL CDR2, and VL CDR3, respectively, of SEQ ID NO:49. In some embodiments, the first binding domain comprises a VH having an amino acid sequence of SEQ ID NO:46. In some embodiments, the first binding domain comprises a VL having an amino acid sequence of SEQ ID NO:47. In some embodiments, the first binding domain comprises a VH having an amino acid sequence of SEQ ID NO:46, and a VL having an amino acid sequence of SEQ ID NO:47. In some embodiments, the first binding domain comprises a heavy chain having an amino acid sequence of SEQ ID NO:11. In some embodiments, the first binding domain comprises a light chain having an amino acid sequence of SEQ ID NO:12. In some embodiments, the first binding domain comprises a heavy chain having an amino acid sequence having at least 95% identity to an amino acid sequence of SEQ ID NO:11, and a light chain having an amino acid sequence having at least 95% identity to an amino acid sequence of SEQ ID NO:12. In some embodiments, the first binding domain comprises a VH having an amino acid sequence having at least 95% identity to an amino acid sequence of SEQ ID NO:46. In some embodiments, the first binding domain comprises a VL having an amino acid sequence having at least 95% identity to an amino acid sequence of SEQ ID NO:47. In some embodiments, the first binding domain comprises a VH having an amino acid sequence having at least 95% identity to an amino acid sequence of SEQ ID NO:46, and a VL having an amino acid sequence having at least 95% identity to an amino acid sequence of SEQ ID NO:47. In some embodiments, the first binding domain comprises a heavy chain having an amino acid sequence having at least 95% identity to an amino acid sequence of SEQ ID NO:11. In some embodiments, the first binding domain comprises a light chain having an amino acid sequence having at least 95% identity to an amino acid sequence of SEQ ID NO:12. In some embodiments, the first binding domain comprises a heavy chain having an amino acid sequence having at least 95% identity to an amino acid sequence of SEQ ID NO:11, and a light chain having an amino acid sequence having at least 95% identity to an amino acid sequence of SEQ ID NO:12.

[0205] In some embodiments, the first binding domain that binds to Vβ17 comprises: (i) a VH comprising a VH CDR1 having an amino acid sequence of SEQ ID NO:48, a VH CDR2 having an amino acid sequence of SEQ ID NO:49, and a VH CDR3 having an amino acid sequence of SEQ ID NO:50; and (ii) a VL comprising a VL CDR1 having an amino acid sequence of SEQ ID NO:51, a VL CDR2 having an amino acid sequence of SEQ ID NO:52, and a VL CDR3 having an amino acid sequence of SEQ ID NO:53. In some embodiments, the first binding domain that binds to Vβ17 comprises: (i) a VH comprising a VH CDR1 having an amino acid sequence of SEQ ID NO:307, a VH CDR2 having an amino acid sequence of SEQ ID NO:308, and a VH CDR3 having an amino acid sequence of SEQ ID NO:309; and (ii) a VL comprising a VL CDR1 having an amino acid sequence of SEQ ID NO:310, a VL CDR2 having an amino acid sequence of SEQ ID NO:311, and a VL CDR3 having an amino acid sequence of SEQ ID NO:312. In some embodiments, the first binding domain that binds to Vβ17 comprises: (i) a VH comprising a VH CDR1 having an amino acid sequence of SEQ ID NO:313, a VH CDR2 having an amino acid sequence of SEQ ID NO:314, and a VH CDR3 having an amino acid sequence of SEQ ID NO:315; and (ii) a VL comprising a VL CDR1 having an amino acid sequence of SEQ ID NO:316, a VL CDR2 having an amino acid sequence of SEQ ID NO:317, and a VL CDR3 having an amino acid sequence of SEQ ID NO:318. In some embodiments, the first binding domain that binds to Vβ17 comprises: (i) a VH comprising a VH CDR1 having an amino acid sequence of SEQ ID NO:319, a VH CDR2 having an amino acid sequence of SEQ ID NO:320, and a VH CDR3 having an amino acid sequence of SEQ ID NO:321; and (ii) a VL comprising a VL CDR1 having an amino acid sequence of SEQ ID NO:322, a VL CDR2 having an amino acid sequence of SEQ ID NO:323, and a VL CDR3 having an amino acid sequence of SEQ ID NO:324. In some embodiments, the first binding domain that binds to Vβ17 comprises: (i) a VH comprising a VH CDR1 having an amino acid sequence of SEQ ID NO:325, a VH CDR2 having an amino acid sequence of SEQ ID NO:326, and a VH CDR3 having an amino acid sequence of SEQ ID NO:327; and (ii) a VL comprising a VL CDR1 having an amino acid sequence of SEQ ID NO:328, a VL CDR2 having an amino acid sequence of SEQ ID NO:329, and a VL CDR3 having an amino acid sequence of SEQ ID NO:330. In some embodiments, the first binding domain that binds to Vβ17 comprises: (i) a VH comprising a VH CDR1 having an amino acid sequence of SEQ ID NO:331, a VH CDR2 having an amino acid sequence of SEQ ID NO:332, and a VH CDR3 having an amino acid sequence of SEQ ID NO:333; and (ii) a VL comprising a VL CDR1 having an amino acid sequence of SEQ ID NO:334, a VL CDR2 having an amino acid sequence of SEQ ID NO:335, and a VL CDR3 having an amino acid sequence of SEQ ID NO:336. In some embodiments, the first binding domain that binds to Vβ17 comprises: (i) a VH comprising a VH CDR1 having an amino acid sequence of SEQ ID NO:337, a VH CDR2 having an amino acid sequence of SEQ ID NO:338, and a VH CDR3 having an amino acid sequence of SEQ ID NO:339; and (ii) a VL comprising a VL CDR1 having an amino acid sequence of SEQ ID NO:340, a VL CDR2 having an amino acid sequence of SEQ ID NO:341, and a VL CDR3 having an amino acid sequence of SEQ ID NO:342. In some embodiments, the first binding domain that binds to Vβ17 comprises: (i) a VH comprising a VH CDR1 having an amino acid sequence of SEQ ID NO:343, a VH CDR2 having an amino acid sequence of SEQ ID NO:344, and a VH CDR3 having an amino acid sequence of SEQ ID NO:345; and (ii) a VL comprising a VL CDR1 having an amino acid sequence of SEQ ID NO:346, a VL CDR2 having an amino acid sequence of SEQ ID NO:347, and a VL CDR3 having an amino acid sequence of SEQ ID NO:348. In some embodiments, the first binding domain that binds to Vβ17 comprises: (i) a VH comprising a VH CDR1, a VH CDR2, and a VH CDR3 having an amino acid sequence of a VH CDR1, VH CDR2, and VH CDR3, respectively, of SEQ ID NO:77; and (ii) a VL comprising a VL CDR1, a VL CDR2, and a VL CDR3 having an amino acid sequence of a VL CDR1, VL CDR2, and VL CDR3, respectively, of SEQ ID NO:78. In some embodiments, the first binding domain comprises a VH having an amino acid sequence of SEQ ID NO:77. In some embodiments, the first binding domain comprises a VL having an amino acid sequence of SEQ ID NO:78. In some embodiments, the first binding domain comprises a VH having an amino acid sequence of SEQ ID NO:77, and a VL having an amino acid sequence of SEQ ID NO:78. In some embodiments, the first binding domain comprises a heavy chain having an amino acid sequence of SEQ ID NO:664. In some embodiments, the first binding domain comprises a light chain having an amino acid sequence of SEQ ID NO:665. In some embodiments, the first binding domain comprises a heavy chain having an amino acid sequence of SEQ ID NO:664, and a light chain having an amino acid sequence of SEQ ID NO:665. In some embodiments, the first binding domain comprises a VH having an amino acid sequence having at least 95% identity to an amino acid sequence of SEQ ID NO:77. In some embodiments, the first binding domain comprises a VL having an amino acid sequence having at least 95% identity to an amino acid sequence of SEQ ID NO:78. In some embodiments, the first binding domain comprises a VH having an amino acid sequence having at least 95% identity to an amino acid sequence of SEQ ID NO:77, and a VL having an amino acid sequence having at least 95% identity to an amino acid sequence of SEQ ID NO:78. In some embodiments, the first binding domain comprises a heavy chain having an amino acid sequence having at least 95% identity to an amino acid sequence of SEQ ID NO:664. In some embodiments, the first binding domain comprises a light chain having an amino acid sequence having at least 95% identity to an amino acid sequence of SEQ ID NO:665. In some embodiments, the first binding domain comprises a heavy chain having an amino acid sequence having at least 95% identity to an amino acid sequence of SEQ ID NO:664, and a light chain having an amino acid sequence having at least 95% identity to an amino acid sequence of SEQ ID NO:665.

[0206] In some embodiments, the first binding domain that binds to Vβ17 comprises: (i) a VH comprising a VH CDR1 having an amino acid sequence of SEQ ID NO:48, a VH CDR2 having an amino acid sequence of SEQ ID NO:54, and a VH CDR3 having an amino acid sequence of SEQ ID NO:55; and (ii) a VL comprising a VL CDR1 having an amino acid sequence of SEQ ID NO:56, a VL CDR2 having an amino acid sequence of SEQ ID NO:57, and a VL CDR3 having an amino acid sequence of SEQ ID NO:58. In some embodiments, the first binding domain that binds to Vβ17 comprises: (i) a VH comprising a VH CDR1 having an amino acid sequence of SEQ ID NO:349, a VH CDR2 having an amino acid sequence of SEQ ID NO:350, and a VH CDR3 having an amino acid sequence of SEQ ID NO:351; and (ii) a VL comprising a VL CDR1 having an amino acid sequence of SEQ ID NO:352, a VL CDR2 having an amino acid sequence of SEQ ID NO:353, and a VL CDR3 having an amino acid sequence of SEQ ID NO:354. In some embodiments, the first binding domain that binds to Vβ17 comprises: (i) a VH comprising a VH CDR1 having an amino acid sequence of SEQ ID NO:355, a VH CDR2 having an amino acid sequence of SEQ ID NO:356, and a VH CDR3 having an amino acid sequence of SEQ ID NO:357; and (ii) a VL comprising a VL CDR1 having an amino acid sequence of SEQ ID NO:358, a VL CDR2 having an amino acid sequence of SEQ ID NO:359, and a VL CDR3 having an amino acid sequence of SEQ ID NO:360. In some embodiments, the first binding domain that binds to Vβ17 comprises: (i) a VH comprising a VH CDR1 having an amino acid sequence of SEQ ID NO:361, a VH CDR2 having an amino acid sequence of SEQ ID NO:362, and a VH CDR3 having an amino acid sequence of SEQ ID NO:363; and (ii) a VL comprising a VL CDR1 having an amino acid sequence of SEQ ID NO:364, a VL CDR2 having an amino acid sequence of SEQ ID NO:365, and a VL CDR3 having an amino acid sequence of SEQ ID NO:366. In some embodiments, the first binding domain that binds to Vβ17 comprises: (i) a VH comprising a VH CDR1 having an amino acid sequence of SEQ ID NO:367, a VH CDR2 having an amino acid sequence of SEQ ID NO:368, and a VH CDR3 having an amino acid sequence of SEQ ID NO:369; and (ii) a VL comprising a VL CDR1 having an amino acid sequence of SEQ ID NO:370, a VL CDR2 having an amino acid sequence of SEQ ID NO:371, and a VL CDR3 having an amino acid sequence of SEQ ID NO:372. In some embodiments, the first binding domain that binds to Vβ17 comprises: (i) a VH comprising a VH CDR1 having an amino acid sequence of SEQ ID NO:373, a VH CDR2 having an amino acid sequence of SEQ ID NO:374, and a VH CDR3 having an amino acid sequence of SEQ ID NO:375; and (ii) a VL comprising a VL CDR1 having an amino acid sequence of SEQ ID NO:376, a VL CDR2 having an amino acid sequence of SEQ ID NO:377, and a VL CDR3 having an amino acid sequence of SEQ ID NO:378. In some embodiments, the first binding domain that binds to Vβ17 comprises: (i) a VH comprising a VH CDR1 having an amino acid sequence of SEQ ID NO:379, a VH CDR2 having an amino acid sequence of SEQ ID NO:380, and a VH CDR3 having an amino acid sequence of SEQ ID NO:381; and (ii) a VL comprising a VL CDR1 having an amino acid sequence of SEQ ID NO:382, a VL CDR2 having an amino acid sequence of SEQ ID NO:383, and a VL CDR3 having an amino acid sequence of SEQ ID NO:384. In some embodiments, the first binding domain that binds to Vβ17 comprises: (i) a VH comprising a VH CDR1 having an amino acid sequence of SEQ ID NO:385, a VH CDR2 having an amino acid sequence of SEQ ID NO:386, and a VH CDR3 having an amino acid sequence of SEQ ID NO:387; and (ii) a VL comprising a VL CDR1 having an amino acid sequence of SEQ ID NO:388, a VL CDR2 having an amino acid sequence of SEQ ID NO:389, and a VL CDR3 having an amino acid sequence of SEQ ID NO:390 In some embodiments, the first binding domain that binds to Vβ17 comprises: (i) a VH comprising a VH CDR1, a VH CDR2, and a VH CDR3 having an amino acid sequence of a VH CDR1, VH CDR2, and VH CDR3, respectively, of SEQ ID NO:79; and (ii) a VL comprising a VL CDR1, a VL CDR2, and a VL CDR3 having an amino acid sequence of a VL CDR1, VL CDR2, and VL CDR3, respectively, of SEQ ID NO:80. In some embodiments, the first binding domain comprises a VH having an amino acid sequence of SEQ ID NO:79. In some embodiments, the first binding domain comprises a VL having an amino acid sequence of SEQ ID NO:80. In some embodiments, the first binding domain comprises a VH having an amino acid sequence of SEQ ID NO:79, and a VL having an amino acid sequence of SEQ ID NO:80. In some embodiments, the first binding domain comprises a heavy chain having an amino acid sequence of SEQ ID NO:666. In some embodiments, the first binding domain comprises a light chain having an amino acid sequence of SEQ ID NO:667. In some embodiments, the first binding domain comprises a heavy chain having an amino acid sequence of SEQ ID NO:666, and a light chain having an amino acid sequence of SEQ ID NO:667. In some embodiments, the first binding domain comprises a VH having an amino acid sequence having at least 95% identity to an amino acid sequence of SEQ ID NO:79. In some embodiments, the first binding domain comprises a VL having an amino acid sequence having at least 95% identity to an amino acid sequence of SEQ ID NO:80. In some embodiments, the first binding domain comprises a VH having an amino acid sequence having at least 95% identity to an amino acid sequence of SEQ ID NO:79, and a VL having an amino acid sequence having at least 95% identity to an amino acid sequence of SEQ ID NO:80. In some embodiments, the first binding domain comprises a heavy chain having an amino acid sequence having at least 95% identity to an amino acid sequence of SEQ ID NO:666. In some embodiments, the first binding domain comprises a light chain having an amino acid sequence having at least 95% identity to an amino acid sequence of SEQ ID NO:667. In some embodiments, the first binding domain comprises a heavy chain having an amino acid sequence having at least 95% identity to an amino acid sequence of SEQ ID NO:666, and a light chain having an amino acid sequence having at least 95% identity to an amino acid sequence of SEQ ID NO:667.

[0207] In some embodiments, the first binding domain that binds to Vβ17 comprises: (i) a VH comprising a VH CDR1 having an amino acid sequence of SEQ ID NO:59, a VH CDR2 having an amino acid sequence of SEQ ID NO:49, and a VH CDR3 having an amino acid sequence of SEQ ID NO:60; and (ii) a VL comprising a VL CDR1 having an amino acid sequence of SEQ ID NO:61, a VL CDR2 having an amino acid sequence of SEQ ID NO:62, and a VL CDR3 having an amino acid sequence of SEQ ID NO:63. In some embodiments, the first binding domain that binds to Vβ17 comprises: (i) a VH comprising a VH CDR1 having an amino acid sequence of SEQ ID NO:391, a VH CDR2 having an amino acid sequence of SEQ ID NO:392, and a VH CDR3 having an amino acid sequence of SEQ ID NO:393; and (ii) a VL comprising a VL CDR1 having an amino acid sequence of SEQ ID NO:394, a VL CDR2 having an amino acid sequence of SEQ ID NO:395, and a VL CDR3 having an amino acid sequence of SEQ ID NO:396. In some embodiments, the first binding domain that binds to Vβ17 comprises: (i) a VH comprising a VH CDR1 having an amino acid sequence of SEQ ID NO:397, a VH CDR2 having an amino acid sequence of SEQ ID NO:398, and a VH CDR3 having an amino acid sequence of SEQ ID NO:399; and (ii) a VL comprising a VL CDR1 having an amino acid sequence of SEQ ID NO:400, a VL CDR2 having an amino acid sequence of SEQ ID NO:401, and a VL CDR3 having an amino acid sequence of SEQ ID NO:402. In some embodiments, the first binding domain that binds to Vβ17 comprises: (i) a VH comprising a VH CDR1 having an amino acid sequence of SEQ ID NO:403, a VH CDR2 having an amino acid sequence of SEQ ID NO:404, and a VH CDR3 having an amino acid sequence of SEQ ID NO:405; and (ii) a VL comprising a VL CDR1 having an amino acid sequence of SEQ ID NO:406, a VL CDR2 having an amino acid sequence of SEQ ID NO:407, and a VL CDR3 having an amino acid sequence of SEQ ID NO:408. In some embodiments, the first binding domain that binds to Vβ17 comprises: (i) a VH comprising a VH CDR1 having an amino acid sequence of SEQ ID NO:409, a VH CDR2 having an amino acid sequence of SEQ ID NO:410, and a VH CDR3 having an amino acid sequence of SEQ ID NO:411; and (ii) a VL comprising a VL CDR1 having an amino acid sequence of SEQ ID NO:412, a VL CDR2 having an amino acid sequence of SEQ ID NO:413, and a VL CDR3 having an amino acid sequence of SEQ ID NO:414. In some embodiments, the first binding domain that binds to Vβ17 comprises: (i) a VH comprising a VH CDR1 having an amino acid sequence of SEQ ID NO:415, a VH CDR2 having an amino acid sequence of SEQ ID NO:416, and a VH CDR3 having an amino acid sequence of SEQ ID NO:417; and (ii) a VL comprising a VL CDR1 having an amino acid sequence of SEQ ID NO:418, a VL CDR2 having an amino acid sequence of SEQ ID NO:419, and a VL CDR3 having an amino acid sequence of SEQ ID NO:420. In some embodiments, the first binding domain that binds to Vβ17 comprises: (i) a VH comprising a VH CDR1 having an amino acid sequence of SEQ ID NO:421, a VH CDR2 having an amino acid sequence of SEQ ID NO:422, and a VH CDR3 having an amino acid sequence of SEQ ID NO:423; and (ii) a VL comprising a VL CDR1 having an amino acid sequence of SEQ ID NO:424, a VL CDR2 having an amino acid sequence of SEQ ID NO:425, and a VL CDR3 having an amino acid sequence of SEQ ID NO:426. In some embodiments, the first binding domain that binds to Vβ17 comprises: (i) a VH comprising a VH CDR1 having an amino acid sequence of SEQ ID NO:427, a VH CDR2 having an amino acid sequence of SEQ ID NO:428, and a VH CDR3 having an amino acid sequence of SEQ ID NO:429; and (ii) a VL comprising a VL CDR1 having an amino acid sequence of SEQ ID NO:430, a VL CDR2 having an amino acid sequence of SEQ ID NO:431, and a VL CDR3 having an amino acid sequence of SEQ ID NO:432. In some embodiments, the first binding domain that binds to Vβ17 comprises: (i) a VH comprising a VH CDR1, a VH CDR2, and a VH CDR3 having an amino acid sequence of a VH CDR1, VH CDR2, and VH CDR3, respectively, of SEQ ID NO:81; and (ii) a VL comprising a VL CDR1, a VL CDR2, and a VL CDR3 having an amino acid sequence of a VL CDR1, VL CDR2, and VL CDR3, respectively, of SEQ ID NO:82. In some embodiments, the first binding domain comprises a VH having an amino acid sequence of SEQ ID NO:81. In some embodiments, the first binding domain comprises a VL having an amino acid sequence of SEQ ID NO:82. In some embodiments, the first binding domain comprises a VH having an amino acid sequence of SEQ ID NO:81, and a VL having an amino acid sequence of SEQ ID NO:82. In some embodiments, the first binding domain comprises a heavy chain having an amino acid sequence of SEQ ID NO:668. In some embodiments, the first binding domain comprises a light chain having an amino acid sequence of SEQ ID NO:669. In some embodiments, the first binding domain comprises a heavy chain having an amino acid sequence of SEQ ID NO:668, and a light chain having an amino acid sequence of SEQ ID NO:669. In some embodiments, the first binding domain comprises a VH having an amino acid sequence having at least 95% identity to an amino acid sequence of SEQ ID NO:81. In some embodiments, the first binding domain comprises a VL having an amino acid sequence having at least 95% identity to an amino acid sequence of SEQ ID NO:82. In some embodiments, the first binding domain comprises a VH having an amino acid sequence having at least 95% identity to an amino acid sequence of SEQ ID NO:81, and a VL having an amino acid sequence having at least 95% identity to an amino acid sequence of SEQ ID NO:82. In some embodiments, the first binding domain comprises a heavy chain having an amino acid sequence having at least 95% identity to an amino acid sequence of SEQ ID NO:668. In some embodiments, the first binding domain comprises a light chain having an amino acid sequence having at least 95% identity to an amino acid sequence of SEQ ID NO:669. In some embodiments, the first binding domain comprises a heavy chain having an amino acid sequence having at least 95% identity to an amino acid sequence of SEQ ID NO:668, and a light chain having an amino acid sequence having at least 95% identity to an amino acid sequence of SEQ ID NO:669.

[0208] In some embodiments, the first binding domain that binds to Vβ17 comprises: (i) a VH comprising a VH CDR1 having an amino acid sequence of SEQ ID NO:64, a VH CDR2 having an amino acid sequence of SEQ ID NO:65, and a VH CDR3 having an amino acid sequence of SEQ ID NO:66; and (ii) a VL comprising a VL CDR1 having an amino acid sequence of SEQ ID NO:67, a VL CDR2 having an amino acid sequence of SEQ ID NO:68, and a VL CDR3 having an amino acid sequence of SEQ ID NO:69. In some embodiments, the first binding domain that binds to Vβ17 comprises: (i) a VH comprising a VH CDR1 having an amino acid sequence of SEQ ID NO:433, a VH CDR2 having an amino acid sequence of SEQ ID NO:434, and a VH CDR3 having an amino acid sequence of SEQ ID NO:435; and (ii) a VL comprising a VL CDR1 having an amino acid sequence of SEQ ID NO:436, a VL CDR2 having an amino acid sequence of SEQ ID NO:437, and a VL CDR3 having an amino acid sequence of SEQ ID NO:438. In some embodiments, the first binding domain that binds to Vβ17 comprises: (i) a VH comprising a VH CDR1 having an amino acid sequence of SEQ ID NO:439, a VH CDR2 having an amino acid sequence of SEQ ID NO:440, and a VH CDR3 having an amino acid sequence of SEQ ID NO:441; and (ii) a VL comprising a VL CDR1 having an amino acid sequence of SEQ ID NO:442, a VL CDR2 having an amino acid sequence of SEQ ID NO:443, and a VL CDR3 having an amino acid sequence of SEQ ID NO:444. In some embodiments, the first binding domain that binds to Vβ17 comprises: (i) a VH comprising a VH CDR1 having an amino acid sequence of SEQ ID NO:445, a VH CDR2 having an amino acid sequence of SEQ ID NO:446, and a VH CDR3 having an amino acid sequence of SEQ ID NO:447; and (ii) a VL comprising a VL CDR1 having an amino acid sequence of SEQ ID NO:448, a VL CDR2 having an amino acid sequence of SEQ ID NO:449, and a VL CDR3 having an amino acid sequence of SEQ ID NO:450. In some embodiments, the first binding domain that binds to Vβ17 comprises: (i) a VH comprising a VH CDR1 having an amino acid sequence of SEQ ID NO:451, a VH CDR2 having an amino acid sequence of SEQ ID NO:452, and a VH CDR3 having an amino acid sequence of SEQ ID NO:453; and (ii) a VL comprising a VL CDR1 having an amino acid sequence of SEQ ID NO:454, a VL CDR2 having an amino acid sequence of SEQ ID NO:455, and a VL CDR3 having an amino acid sequence of SEQ ID NO:456. In some embodiments, the first binding domain that binds to Vβ17 comprises: (i) a VH comprising a VH CDR1 having an amino acid sequence of SEQ ID NO:457, a VH CDR2 having an amino acid sequence of SEQ ID NO:458, and a VH CDR3 having an amino acid sequence of SEQ ID NO:459; and (ii) a VL comprising a VL CDR1 having an amino acid sequence of SEQ ID NO:460, a VL CDR2 having an amino acid sequence of SEQ ID NO:461, and a VL CDR3 having an amino acid sequence of SEQ ID NO:462. In some embodiments, the first binding domain that binds to Vβ17 comprises: (i) a VH comprising a VH CDR1 having an amino acid sequence of SEQ ID NO:463, a VH CDR2 having an amino acid sequence of SEQ ID NO:464, and a VH CDR3 having an amino acid sequence of SEQ ID NO:465; and (ii) a VL comprising a VL CDR1 having an amino acid sequence of SEQ ID NO:466, a VL CDR2 having an amino acid sequence of SEQ ID NO:467, and a VL CDR3 having an amino acid sequence of SEQ ID NO:468. In some embodiments, the first binding domain that binds to Vβ17 comprises: (i) a VH comprising a VH CDR1 having an amino acid sequence of SEQ ID NO:469, a VH CDR2 having an amino acid sequence of SEQ ID NO:470, and a VH CDR3 having an amino acid sequence of SEQ ID NO:471; and (ii) a VL comprising a VL CDR1 having an amino acid sequence of SEQ ID NO:472, a VL CDR2 having an amino acid sequence of SEQ ID NO:473, and a VL CDR3 having an amino acid sequence of SEQ ID NO:474. In some embodiments, the first binding domain that binds to Vβ17 comprises: (i) a VH comprising a VH CDR1, a VH CDR2, and a VH CDR3 having an amino acid sequence of a VH CDR1, VH CDR2, and VH CDR3, respectively, of SEQ ID NO:83; and (ii) a VL comprising a VL CDR1, a VL CDR2, and a VL CDR3 having an amino acid sequence of a VL CDR1, VL CDR2, and VL CDR3, respectively, of SEQ ID NO:84. In some embodiments, the first binding domain comprises a VH having an amino acid sequence of SEQ ID NO:83. In some embodiments, the first binding domain comprises a VL having an amino acid sequence of SEQ ID NO:84. In some embodiments, the first binding domain comprises a VH having an amino acid sequence of SEQ ID NO:83, and a VL having an amino acid sequence of SEQ ID NO:84. In some embodiments, the first binding domain comprises a heavy chain having an amino acid sequence of SEQ ID NO:670. In some embodiments, the first binding domain comprises a light chain having an amino acid sequence of SEQ ID NO:671. In some embodiments, the first binding domain comprises a heavy chain having an amino acid sequence of SEQ ID NO:670, and a light chain having an amino acid sequence of SEQ ID NO:671. In some embodiments, the first binding domain comprises a VH having an amino acid sequence having at least 95% identity to an amino acid sequence of SEQ ID NO:83. In some embodiments, the first binding domain comprises a VL having an amino acid sequence having at least 95% identity to an amino acid sequence of SEQ ID NO:84. In some embodiments, the first binding domain comprises a VH having an amino acid sequence having at least 95% identity to an amino acid sequence of SEQ ID NO:83, and a VL having an amino acid sequence having at least 95% identity to an amino acid sequence of SEQ ID NO:84. In some embodiments, the first binding domain comprises a heavy chain having an amino acid sequence having at least 95% identity to an amino acid sequence of SEQ ID NO:670. In some embodiments, the first binding domain comprises a light chain having an amino acid sequence having at least 95% identity to an amino acid sequence of SEQ ID NO:671. In some embodiments, the first binding domain comprises a heavy chain having an amino acid sequence having at least 95% identity to an amino acid sequence of SEQ ID NO:670, and a light chain having an amino acid sequence having at least 95% identity to an amino acid sequence of SEQ ID NO:671.

[0209] In some embodiments, the first binding domain that binds to Vβ17 comprises: (i) a VH comprising a VH CDR1 having an amino acid sequence of SEQ ID NO:70, a VH CDR2 having an amino acid sequence of SEQ ID NO:49, and a VH CDR3 having an amino acid sequence of SEQ ID NO:71; and (ii) a VL comprising a VL CDR1 having an amino acid sequence of SEQ ID NO:61, a VL CDR2 having an amino acid sequence of SEQ ID NO:72, and a VL CDR3 having an amino acid sequence of SEQ ID NO:73. In some embodiments, the first binding domain that binds to Vβ17 comprises: (i) a VH comprising a VH CDR1 having an amino acid sequence of SEQ ID NO:475, a VH CDR2 having an amino acid sequence of SEQ ID NO:476, and a VH CDR3 having an amino acid sequence of SEQ ID NO:477; and (ii) a VL comprising a VL CDR1 having an amino acid sequence of SEQ ID NO:478, a VL CDR2 having an amino acid sequence of SEQ ID NO:479, and a VL CDR3 having an amino acid sequence of SEQ ID NO:480. In some embodiments, the first binding domain that binds to Vβ17 comprises: (i) a VH comprising a VH CDR1 having an amino acid sequence of SEQ ID NO:481, a VH CDR2 having an amino acid sequence of SEQ ID NO:482, and a VH CDR3 having an amino acid sequence of SEQ ID NO:483; and (ii) a VL comprising a VL CDR1 having an amino acid sequence of SEQ ID NO:484, a VL CDR2 having an amino acid sequence of SEQ ID NO:485, and a VL CDR3 having an amino acid sequence of SEQ ID NO:486. In some embodiments, the first binding domain that binds to Vβ17 comprises: (i) a VH comprising a VH CDR1 having an amino acid sequence of SEQ ID NO:487, a VH CDR2 having an amino acid sequence of SEQ ID NO:488, and a VH CDR3 having an amino acid sequence of SEQ ID NO:489; and (ii) a VL comprising a VL CDR1 having an amino acid sequence of SEQ ID NO:490, a VL CDR2 having an amino acid sequence of SEQ ID NO:491, and a VL CDR3 having an amino acid sequence of SEQ ID NO:492. In some embodiments, the first binding domain that binds to Vβ17 comprises: (i) a VH comprising a VH CDR1 having an amino acid sequence of SEQ ID NO:493, a VH CDR2 having an amino acid sequence of SEQ ID NO:494, and a VH CDR3 having an amino acid sequence of SEQ ID NO:495; and (ii) a VL comprising a VL CDR1 having an amino acid sequence of SEQ ID NO:496, a VL CDR2 having an amino acid sequence of SEQ ID NO:497, and a VL CDR3 having an amino acid sequence of SEQ ID NO:498. In some embodiments, the first binding domain that binds to Vβ17 comprises: (i) a VH comprising a VH CDR1 having an amino acid sequence of SEQ ID NO:499, a VH CDR2 having an amino acid sequence of SEQ ID NO:500, and a VH CDR3 having an amino acid sequence of SEQ ID NO:501; and (ii) a VL comprising a VL CDR1 having an amino acid sequence of SEQ ID NO:502, a VL CDR2 having an amino acid sequence of SEQ ID NO:503, and a VL CDR3 having an amino acid sequence of SEQ ID NO:504. In some embodiments, the first binding domain that binds to Vβ17 comprises: (i) a VH comprising a VH CDR1 having an amino acid sequence of SEQ ID NO:505, a VH CDR2 having an amino acid sequence of SEQ ID NO:506, and a VH CDR3 having an amino acid sequence of SEQ ID NO:507; and (ii) a VL comprising a VL CDR1 having an amino acid sequence of SEQ ID NO:508, a VL CDR2 having an amino acid sequence of SEQ ID NO:509, and a VL CDR3 having an amino acid sequence of SEQ ID NO:510. In some embodiments, the first binding domain that binds to Vβ17 comprises: (i) a VH comprising a VH CDR1 having an amino acid sequence of SEQ ID NO:511, a VH CDR2 having an amino acid sequence of SEQ ID NO:512, and a VH CDR3 having an amino acid sequence of SEQ ID NO:513; and (ii) a VL comprising a VL CDR1 having an amino acid sequence of SEQ ID NO:514, a VL CDR2 having an amino acid sequence of SEQ ID NO:515, and a VL CDR3 having an amino acid sequence of SEQ ID NO:516 In some embodiments, the first binding domain that binds to Vβ17 comprises: (i) a VH comprising a VH CDR1, a VH CDR2, and a VH CDR3 having an amino acid sequence of a VH CDR1, VH CDR2, and VH CDR3, respectively, of SEQ ID NO:85; and (ii) a VL comprising a VL CDR1, a VL CDR2, and a VL CDR3 having an amino acid sequence of a VL CDR1, VL CDR2, and VL CDR3, respectively, of SEQ ID NO:86. In some embodiments, the first binding domain comprises a VH having an amino acid sequence of SEQ ID NO:85. In some embodiments, the first binding domain comprises a VL having an amino acid sequence of SEQ ID NO:86. In some embodiments, the first binding domain comprises a VH having an amino acid sequence of SEQ ID NO:85, and a VL having an amino acid sequence of SEQ ID NO:86. In some embodiments, the first binding domain comprises a heavy chain having an amino acid sequence of SEQ ID NO:672. In some embodiments, the first binding domain comprises a light chain having an amino acid sequence of SEQ ID NO:673. In some embodiments, the first binding domain comprises a heavy chain having an amino acid sequence of SEQ ID NO:672, and a light chain having an amino acid sequence of SEQ ID NO:673. In some embodiments, the first binding domain comprises a VH having an amino acid sequence having at least 95% identity to an amino acid sequence of SEQ ID NO:85. In some embodiments, the first binding domain comprises a VL having an amino acid sequence having at least 95% identity to an amino acid sequence of SEQ ID NO:86. In some embodiments, the first binding domain comprises a VH having an amino acid sequence having at least 95% identity to an amino acid sequence of SEQ ID NO:85, and a VL having an amino acid sequence having at least 95% identity to an amino acid sequence of SEQ ID NO:86. In some embodiments, the first binding domain comprises a heavy chain having an amino acid sequence having at least 95% identity to an amino acid sequence of SEQ ID NO:672. In some embodiments, the first binding domain comprises a light chain having an amino acid sequence having at least 95% identity to an amino acid sequence of SEQ ID NO:673. In some embodiments, the first binding domain comprises a heavy chain having an amino acid sequence having at least 95% identity to an amino acid sequence of SEQ ID NO:672, and a light chain having an amino acid sequence having at least 95% identity to an amino acid sequence of SEQ ID NO:673.

[0210] In some embodiments, the first binding domain that binds to Vβ17 comprises: (i) a VH comprising a VH CDR1 having an amino acid sequence of SEQ ID NO:48, a VH CDR2 having an amino acid sequence of SEQ ID NO:74, and a VH CDR3 having an amino acid sequence of SEQ ID NO:75; and (ii) a VL comprising a VL CDR1 having an amino acid sequence of SEQ ID NO:56, a VL CDR2 having an amino acid sequence of SEQ ID NO:57, and a VL CDR3 having an amino acid sequence of SEQ ID NO:76. In some embodiments, the first binding domain that binds to Vβ17 comprises: (i) a VH comprising a VH CDR1 having an amino acid sequence of SEQ ID NO:517, a VH CDR2 having an amino acid sequence of SEQ ID NO:518, and a VH CDR3 having an amino acid sequence of SEQ ID NO:519; and (ii) a VL comprising a VL CDR1 having an amino acid sequence of SEQ ID NO:520, a VL CDR2 having an amino acid sequence of SEQ ID NO:521, and a VL CDR3 having an amino acid sequence of SEQ ID NO:522. In some embodiments, the first binding domain that binds to Vβ17 comprises: (i) a VH comprising a VH CDR1 having an amino acid sequence of SEQ ID NO:523, a VH CDR2 having an amino acid sequence of SEQ ID NO:524, and a VH CDR3 having an amino acid sequence of SEQ ID NO:525; and (ii) a VL comprising a VL CDR1 having an amino acid sequence of SEQ ID NO:526, a VL CDR2 having an amino acid sequence of SEQ ID NO:527, and a VL CDR3 having an amino acid sequence of SEQ ID NO:528. In some embodiments, the first binding domain that binds to Vβ17 comprises: (i) a VH comprising a VH CDR1 having an amino acid sequence of SEQ ID NO:529, a VH CDR2 having an amino acid sequence of SEQ ID NO:530, and a VH CDR3 having an amino acid sequence of SEQ ID NO:531; and (ii) a VL comprising a VL CDR1 having an amino acid sequence of SEQ ID NO:532, a VL CDR2 having an amino acid sequence of SEQ ID NO:533, and a VL CDR3 having an amino acid sequence of SEQ ID NO:534. In some embodiments, the first binding domain that binds to Vβ17 comprises: (i) a VH comprising a VH CDR1 having an amino acid sequence of SEQ ID NO:535, a VH CDR2 having an amino acid sequence of SEQ ID NO:536, and a VH CDR3 having an amino acid sequence of SEQ ID NO:537; and (ii) a VL comprising a VL CDR1 having an amino acid sequence of SEQ ID NO:538, a VL CDR2 having an amino acid sequence of SEQ ID NO:539, and a VL CDR3 having an amino acid sequence of SEQ ID NO:540. In some embodiments, the first binding domain that binds to Vβ17 comprises: (i) a VH comprising a VH CDR1 having an amino acid sequence of SEQ ID NO:541, a VH CDR2 having an amino acid sequence of SEQ ID NO:542, and a VH CDR3 having an amino acid sequence of SEQ ID NO:543; and (ii) a VL comprising a VL CDR1 having an amino acid sequence of SEQ ID NO:544, a VL CDR2 having an amino acid sequence of SEQ ID NO:545, and a VL CDR3 having an amino acid sequence of SEQ ID NO:546. In some embodiments, the first binding domain that binds to Vβ17 comprises: (i) a VH comprising a VH CDR1 having an amino acid sequence of SEQ ID NO:547, a VH CDR2 having an amino acid sequence of SEQ ID NO:548, and a VH CDR3 having an amino acid sequence of SEQ ID NO:549; and (ii) a VL comprising a VL CDR1 having an amino acid sequence of SEQ ID NO:550, a VL CDR2 having an amino acid sequence of SEQ ID NO:551, and a VL CDR3 having an amino acid sequence of SEQ ID NO:552. In some embodiments, the first binding domain that binds to Vβ17 comprises: i) a VH comprising a VH CDR1 having an amino acid sequence of SEQ ID NO:553, a VH CDR2 having an amino acid sequence of SEQ ID NO:554, and a VH CDR3 having an amino acid sequence of SEQ ID NO:555; and (ii) a VL comprising a VL CDR1 having an amino acid sequence of SEQ ID NO:556, a VL CDR2 having an amino acid sequence of SEQ ID NO:557, and a VL CDR3 having an amino acid sequence of SEQ ID NO:558. In some embodiments, the first binding domain that binds to Vβ17 comprises: (i) a VH comprising a VH CDR1, a VH CDR2, and a VH CDR3 having an amino acid sequence of a VH CDR1, VH CDR2, and VH CDR3, respectively, of SEQ ID NO:87; and (ii) a VL comprising a VL CDR1, a VL CDR2, and a VL CDR3 having an amino acid sequence of a VL CDR1, VL CDR2, and VL CDR3, respectively, of SEQ ID NO:88. In some embodiments, the first binding domain comprises a VH having an amino acid sequence of SEQ ID NO:87. In some embodiments, the first binding domain comprises a VL having an amino acid sequence of SEQ ID NO:88. In some embodiments, the first binding domain comprises a VH having an amino acid sequence of SEQ ID NO:87, and a VL having an amino acid sequence of SEQ ID NO:88. In some embodiments, the first binding domain comprises a heavy chain having an amino acid sequence of SEQ ID NO:674. In some embodiments, the first binding domain comprises a light chain having an amino acid sequence of SEQ ID NO:675. In some embodiments, the first binding domain comprises a heavy chain having an amino acid sequence of SEQ ID NO:674, and a light chain having an amino acid sequence of SEQ ID NO:675. In some embodiments, the first binding domain comprises a VH having an amino acid sequence having at least 95% identity to an amino acid sequence of SEQ ID NO:87. In some embodiments, the first binding domain comprises a VL having an amino acid sequence having at least 95% identity to an amino acid sequence of SEQ ID NO:88. In some embodiments, the first binding domain comprises a VH having an amino acid sequence having at least 95% identity to an amino acid sequence of SEQ ID NO:87, and a VL having an amino acid sequence having at least 95% identity to an amino acid sequence of SEQ ID NO:88. In some embodiments, the first binding domain comprises a heavy chain having an amino acid sequence having at least 95% identity to an amino acid sequence of SEQ ID NO:674. In some embodiments, the first binding domain comprises a light chain having an amino acid sequence having at least 95% identity to an amino acid sequence of SEQ ID NO:675. In some embodiments, the first binding domain comprises a heavy chain having an amino acid sequence having at least 95% identity to an amino acid sequence of SEQ ID NO:674, and a light chain having an amino acid sequence having at least 95% identity to an amino acid sequence of SEQ ID NO:675.

[0211] In some embodiments, the first binding domain that binds to Vβ17 comprises: (i) a VH comprising a VH CDR1 having an amino acid sequence of SEQ ID NO:1, a VH CDR2 having an amino acid sequence of SEQ ID NO:2, and a VH CDR3 having an amino acid sequence of SEQ ID NO:3; and (ii) a VL comprising a VL CDR1 having an amino acid sequence of SEQ ID NO:664, a VL CDR2 having an amino acid sequence of SEQ ID NO:5, and a VL CDR3 having an amino acid sequence of SEQ ID NO:6. In some embodiments, the first binding domain that binds to Vβ17 comprises: (i) a VH comprising a VH CDR1 having an amino acid sequence of SEQ ID NO:223, a VH CDR2 having an amino acid sequence of SEQ ID NO:224, and a VH CDR3 having an amino acid sequence of SEQ ID NO:225; and (ii) a VL comprising a VL CDR1 having an amino acid sequence of SEQ ID NO:678, a VL CDR2 having an amino acid sequence of SEQ ID NO:227, and a VL CDR3 having an amino acid sequence of SEQ ID NO:228. In some embodiments, the first binding domain that binds to Vβ17 comprises: (i) a VH comprising a VH CDR1 having an amino acid sequence of SEQ ID NO:229, a VH CDR2 having an amino acid sequence of SEQ ID NO:230, and a VH CDR3 having an amino acid sequence of SEQ ID NO:231; and (ii) a VL comprising a VL CDR1 having an amino acid sequence of SEQ ID NO:679, a VL CDR2 having an amino acid sequence of SEQ ID NO:233, and a VL CDR3 having an amino acid sequence of SEQ ID NO:234. In some embodiments, the first binding domain that binds to Vβ17 comprises: (i) a VH comprising a VH CDR1 having an amino acid sequence of SEQ ID NO:235, a VH CDR2 having an amino acid sequence of SEQ ID NO:236, and a VH CDR3 having an amino acid sequence of SEQ ID NO:237; and (ii) a VL comprising a VL CDR1 having an amino acid sequence of SEQ ID NO:680, a VL CDR2 having an amino acid sequence of SEQ ID NO:239, and a VL CDR3 having an amino acid sequence of SEQ ID NO:240. In some embodiments, the first binding domain that binds to Vβ17 comprises: (i) a VH comprising a VH CDR1 having an amino acid sequence of SEQ ID NO:241, a VH CDR2 having an amino acid sequence of SEQ ID NO:242, and a VH CDR3 having an amino acid sequence of SEQ ID NO:243; and (ii) a VL comprising a VL CDR1 having an amino acid sequence of SEQ ID NO:681, a VL CDR2 having an amino acid sequence of SEQ ID NO:245, and a VL CDR3 having an amino acid sequence of SEQ ID NO:246. In some embodiments, the first binding domain that binds to Vβ17 comprises: (i) a VH comprising a VH CDR1 having an amino acid sequence of SEQ ID NO:241, a VH CDR2 having an amino acid sequence of SEQ ID NO:682, and a VH CDR3 having an amino acid sequence of SEQ ID NO:683; and (ii) a VL comprising a VL CDR1 having an amino acid sequence of SEQ ID NO:684, a VL CDR2 having an amino acid sequence of SEQ ID NO:245, and a VL CDR3 having an amino acid sequence of SEQ ID NO:246. In some embodiments, the first binding domain that binds to Vβ17 comprises: (i) a VH comprising a VH CDR1 having an amino acid sequence of SEQ ID NO:241, a VH CDR2 having an amino acid sequence of SEQ ID NO:687, and a VH CDR3 having an amino acid sequence of SEQ ID NO:683; and (ii) a VL comprising a VL CDR1 having an amino acid sequence of SEQ ID NO:684, a VL CDR2 having an amino acid sequence of SEQ ID NO:245, and a VL CDR3 having an amino acid sequence of SEQ ID NO:246. In some embodiments, the first binding domain that binds to Vβ17 comprises: (i) a VH comprising a VH CDR1 having an amino acid sequence of SEQ ID NO:253, a VH CDR2 having an amino acid sequence of SEQ ID NO:254, and a VH CDR3 having an amino acid sequence of SEQ ID NO:255; and (ii) a VL comprising a VL CDR1 having an amino acid sequence of SEQ ID NO:685, a VL CDR2 having an amino acid sequence of SEQ ID NO:257, and a VL CDR3 having an amino acid sequence of SEQ ID NO:258. In some embodiments, the first binding domain that binds to Vβ17 comprises: i) a VH comprising a VH CDR1 having an amino acid sequence of SEQ ID NO:259, a VH CDR2 having an amino acid sequence of SEQ ID NO:260, and a VH CDR3 having an amino acid sequence of SEQ ID NO:261; and (ii) a VL comprising a VL CDR1 having an amino acid sequence of SEQ ID NO:686, a VL CDR2 having an amino acid sequence of SEQ ID NO:263, and a VL CDR3 having an amino acid sequence of SEQ ID NO:264. In some embodiments, the first binding domain that binds to Vβ17 comprises: (i) a VH comprising a VH CDR1, a VH CDR2, and a VH CDR3 having an amino acid sequence of a VH CDR1, VH CDR2, and VH CDR3, respectively, of SEQ ID NO:21; and (ii) a VL comprising a VL CDR1, a VL CDR2, and a VL CDR3 having an amino acid sequence of a VL CDR1, VL CDR2, and VL CDR3, respectively, of SEQ ID NO:665. In some embodiments, the first binding domain comprises a VH having an amino acid sequence of SEQ ID NO:21. In some embodiments, the first binding domain comprises a VL having an amino acid sequence of SEQ ID NO:665. In some embodiments, the first binding domain comprises a VH having an amino acid sequence of SEQ ID NO:21, and a VL having an amino acid sequence of SEQ ID NO:665. In some embodiments, the first binding domain comprises a VH having an amino acid sequence having at least 95% identity to an amino acid sequence of SEQ ID NO:21. In some embodiments, the first binding domain comprises a VL having an amino acid sequence having at least 95% identity to an amino acid sequence of SEQ ID NO:665. In some embodiments, the first binding domain comprises a VH having an amino acid sequence having at least 95% identity to an amino acid sequence of SEQ ID NO:21, and a VL having an amino acid sequence having at least 95% identity to an amino acid sequence of SEQ ID NO:665.

[0212] In some embodiments, the first binding domain that binds to Vβ17 comprises: (i) a VH comprising a VH CDR1 having an amino acid sequence of SEQ ID NO:1057, a VH CDR2 having an amino acid sequence of SEQ ID NO:1058, and a VH CDR3 having an amino acid sequence of SEQ ID NO:1059; and (ii) a VL comprising a VL CDR1 having an amino acid sequence of SEQ ID NO:1072, a VL CDR2 having an amino acid sequence of SEQ ID NO:1073, and a VL CDR3 having an amino acid sequence of SEQ ID NO:1074. In some embodiments, the first binding domain that binds to Vβ17 comprises: (i) a VH comprising a VH CDR1 having an amino acid sequence of SEQ ID NO:1060, a VH CDR2 having an amino acid sequence of SEQ ID NO:1061, and a VH CDR3 having an amino acid sequence of SEQ ID NO:1062; and (ii) a VL comprising a VL CDR1 having an amino acid sequence of SEQ ID NO:1075, a VL CDR2 having an amino acid sequence of SEQ ID NO:1076, and a VL CDR3 having an amino acid sequence of SEQ ID NO:1077. In some embodiments, the first binding domain that binds to Vβ17 comprises: (i) a VH comprising a VH CDR1 having an amino acid sequence of SEQ ID NO:1054, a VH CDR2 having an amino acid sequence of SEQ ID NO:1055, and a VH CDR3 having an amino acid sequence of SEQ ID NO:1056; and (ii) a VL comprising a VL CDR1 having an amino acid sequence of SEQ ID NO:1069, a VL CDR2 having an amino acid sequence of SEQ ID NO:1070, and a VL CDR3 having an amino acid sequence of SEQ ID NO:1071. In some embodiments, the first binding domain that binds to Vβ17 comprises: (i) a VH comprising a VH CDR1 having an amino acid sequence of SEQ ID NO:1066, a VH CDR2 having an amino acid sequence of SEQ ID NO:1067, and a VH CDR3 having an amino acid sequence of SEQ ID NO:1068; and (ii) a VL comprising a VL CDR1 having an amino acid sequence of SEQ ID NO:1081, a VL CDR2 having an amino acid sequence of SEQ ID NO:1082, and a VL CDR3 having an amino acid sequence of SEQ ID NO:1083. In some embodiments, the first binding domain that binds to Vβ17 comprises: (i) a VH comprising a VH CDR1 having an amino acid sequence of SEQ ID NO:1063, a VH CDR2 having an amino acid sequence of SEQ ID NO:1064, and a VH CDR3 having an amino acid sequence of SEQ ID NO:1065; and (ii) a VL comprising a VL CDR1 having an amino acid sequence of SEQ ID NO:1078, a VL CDR2 having an amino acid sequence of SEQ ID NO:1079, and a VL CDR3 having an amino acid sequence of SEQ ID NO:1080. In some embodiments, the first binding domain that binds to Vβ17 comprises: (i) a VH comprising a VH CDR1, a VH CDR2, and a VH CDR3 having an amino acid sequence of a VH CDR1, VH CDR2, and VH CDR3, respectively, of SEQ ID NO:1084; and (ii) a VL comprising a VL CDR1, a VL CDR2, and a VL CDR3 having an amino acid sequence of a VL CDR1, VL CDR2, and VL CDR3, respectively, of SEQ ID NO:1085. In some embodiments, the first binding domain comprises a VH having an amino acid sequence of SEQ ID NO:1084. In some embodiments, the first binding domain comprises a VL having an amino acid sequence of SEQ ID NO:1085. In some embodiments, the first binding domain comprises a VH having an amino acid sequence of SEQ ID NO:1084, and a VL having an amino acid sequence of SEQ ID NO:1085. In some embodiments, the first binding domain comprises a VH having an amino acid sequence having at least 95% identity to an amino acid sequence of SEQ ID NO:1084. In some embodiments, the first binding domain comprises a VL having an amino acid sequence having at least 95% identity to an amino acid sequence of SEQ ID NO:1085. In some embodiments, the first binding domain comprises a VH having an amino acid sequence having at least 95% identity to an amino acid sequence of SEQ ID NO:1084, and a VL having an amino acid sequence having at least 95% identity to an amino acid sequence of SEQ ID NO:1085.

[0213] In some embodiments, the second binding domain binds to BCMA. In some embodiments, the second binding domain that binds to BCMA comprises VH CDR1, VH CDR2, and VH CDR3 amino acid sequences of a BCMA antibody provided herein. In some embodiments, the second binding domain that binds to BCMA comprises VL CDR1, VL CDR2 and VL CDR3 amino acid sequences of a BCMA antibody provided herein. In some embodiments, the second binding domain that binds to BCMA comprises VH CDR1, VH CDR2, VH CDR3, VL CDR1, VL CDR2 and VL CDR3 amino acid sequences of a BCMA antibody provided herein. In other embodiments, the second binding domain that binds to BCMA comprises VH amino acid sequence of a BCMA antibody provided herein. In other embodiments, the second binding domain that binds to BCMA comprises a VL amino acid sequence of a BCMA antibody provided herein. In other embodiments, the second binding domain that binds to BCMA comprises VH and VL amino acid sequences of a BCMA antibody provided herein. In other embodiments, the second binding domain that binds to BCMA comprises heavy chain amino acid sequence of a BCMA antibody provided herein. In other embodiments, the second binding domain that binds to BCMA comprises a light chain amino acid sequence of a BCMA antibody provided herein. In other embodiments, the second binding domain that binds to BCMA comprises heavy chain and light chain amino acid sequences of a BCMA antibody provided herein. In some embodiments, the BCMA antibody is clone BCMB519. Other BCMA antibodies, including antigen binding fragments thereof, are also contemplated as the second binding arm that binds to BCMA in the trispecific antibodies provided herein.

[0214] In some embodiments, the second binding domain that binds to BCMA comprises: (i) a VH comprising a VH CDR1 having an amino acid sequence of SEQ ID NO:89, a VH CDR2 having an amino acid sequence of SEQ ID NO:90, and a VH CDR3 having an amino acid sequence of SEQ ID NO:91; and (ii) a VL comprising a VL CDR1 having an amino acid sequence of SEQ ID NO:93, a VL CDR2 having an amino acid sequence of SEQ ID NO:94, and a VL CDR3 having an amino acid sequence of SEQ ID NO:94. In some embodiments, the second binding domain that binds to BCMA comprises: (i) a VH comprising a VH CDR1 having an amino acid sequence of SEQ ID NO:622, a VH CDR2 having an amino acid sequence of SEQ ID NO:623, and a VH CDR3 having an amino acid sequence of SEQ ID NO:624; and (ii) a VL comprising a VL CDR1 having an amino acid sequence of SEQ ID NO:625, a VL CDR2 having an amino acid sequence of SEQ ID NO:626, and a VL CDR3 having an amino acid sequence of SEQ ID NO:627. In some embodiments, the second binding domain that binds to BCMA comprises: (i) a VH comprising a VH CDR1 having an amino acid sequence of SEQ ID NO:628, a VH CDR2 having an amino acid sequence of SEQ ID NO:629, and a VH CDR3 having an amino acid sequence of SEQ ID NO:630; and (ii) a VL comprising a VL CDR1 having an amino acid sequence of SEQ ID NO:631, a VL CDR2 having an amino acid sequence of SEQ ID NO:632, and a VL CDR3 having an amino acid sequence of SEQ ID NO:633. In some embodiments, the second binding domain that binds to BCMA comprises: (i) a VH comprising a VH CDR1 having an amino acid sequence of SEQ ID NO:634, a VH CDR2 having an amino acid sequence of SEQ ID NO:635, and a VH CDR3 having an amino acid sequence of SEQ ID NO:636; and (ii) a VL comprising a VL CDR1 having an amino acid sequence of SEQ ID NO:637, a VL CDR2 having an amino acid sequence of SEQ ID NO:638, and a VL CDR3 having an amino acid sequence of SEQ ID NO:639. In some embodiments, the second binding domain that binds to BCMA comprises: (i) a VH comprising a VH CDR1 having an amino acid sequence of SEQ ID NO:640, a VH CDR2 having an amino acid sequence of SEQ ID NO:641, and a VH CDR3 having an amino acid sequence of SEQ ID NO:642; and (ii) a VL comprising a VL CDR1 having an amino acid sequence of SEQ ID NO:643, a VL CDR2 having an amino acid sequence of SEQ ID NO:644, and a VL CDR3 having an amino acid sequence of SEQ ID NO:645. In some embodiments, the second binding domain that binds to BCMA comprises: (i) a VH comprising a VH CDR1 having an amino acid sequence of SEQ ID NO:646, a VH CDR2 having an amino acid sequence of SEQ ID NO:647, and a VH CDR3 having an amino acid sequence of SEQ ID NO:648; and (ii) a VL comprising a VL CDR1 having an amino acid sequence of SEQ ID NO:649, a VL CDR2 having an amino acid sequence of SEQ ID NO:650, and a VL CDR3 having an amino acid sequence of SEQ ID NO:651. In some embodiments, the second binding domain that binds to BCMA comprises: (i) a VH comprising a VH CDR1 having an amino acid sequence of SEQ ID NO:652, a VH CDR2 having an amino acid sequence of SEQ ID NO:653, and a VH CDR3 having an amino acid sequence of SEQ ID NO:654; and (ii) a VL comprising a VL CDR1 having an amino acid sequence of SEQ ID NO:655, a VL CDR2 having an amino acid sequence of SEQ ID NO:656, and a VL CDR3 having an amino acid sequence of SEQ ID NO:657. In some embodiments, the second binding domain that binds to BCMA comprises: (i) a VH comprising a VH CDR1 having an amino acid sequence of SEQ ID NO:658, a VH CDR2 having an amino acid sequence of SEQ ID NO:659, and a VH CDR3 having an amino acid sequence of SEQ ID NO:660; and (ii) a VL comprising a VL CDR1 having an amino acid sequence of SEQ ID NO:661, a VL CDR2 having an amino acid sequence of SEQ ID NO:662, and a VL CDR3 having an amino acid sequence of SEQ ID NO:663. In some embodiments, the second binding domain that binds to BCMA comprises: (i) a VH comprising a VH CDR1, a VH CDR2, and a VH CDR3 having an amino acid sequence of a VH CDR1, VH CDR2, and VH CDR3, respectively, of SEQ ID NO:95; and (ii) a VL comprising a VL CDR1, a VL CDR2, and a VL CDR3 having an amino acid sequence of a VL CDR1, VL CDR2, and VL CDR3, respectively, of SEQ ID NO:96. In some embodiments, the second binding domain that binds to BCMA comprises a VH having an amino acid sequence of SEQ ID NO:95. In some embodiments, the second binding domain that binds to BCMA comprises a VL having an amino acid sequence of SEQ ID NO:96. In some embodiments, the second binding domain that binds to BCMA comprises a VH having an amino acid sequence of SEQ ID NO:95, and a VL having an amino acid sequence of SEQ ID NO:96. In some embodiments, the second binding domain that binds to BCMA comprises a VH having an amino acid sequence having at least 95% identity to an amino acid sequence of SEQ ID NO:95. In some embodiments, the second binding domain that binds to BCMA comprises a VL having an amino acid sequence having at least 95% identity to an amino acid sequence of SEQ ID NO:96. In some embodiments, the second binding domain that binds to BCMA comprises a VH having an amino acid sequence having at least 95% identity to an amino acid sequence of SEQ ID NO:95, and a VL having an amino acid sequence having at least 95% identity to an amino acid sequence of SEQ ID NO:96. In some embodiments, the second binding domain that binds to BCMA comprises: (i) a VH comprising a VH CDR1, a VH CDR2, and a VH CDR3 having an amino acid sequence of a VH CDR1, VH CDR2, and VH CDR3, respectively, of SEQ ID NO:1052; and (ii) a VL comprising a VL CDR1, a VL CDR2, and a VL CDR3 having an amino acid sequence of a VL CDR1, VL CDR2, and VL CDR3, respectively, of SEQ ID NO:1053. In some embodiments, the second binding domain that binds to BCMA comprises a VH having an amino acid sequence of SEQ ID NO:1052. In some embodiments, the second binding domain that binds to BCMA comprises a VL having an amino acid sequence of SEQ ID NO:1053. In some embodiments, the second binding domain that binds to BCMA comprises a VH having an amino acid sequence of SEQ ID NO:1052, and a VL having an amino acid sequence of SEQ ID NO:1053. In some embodiments, the second binding domain that binds to BCMA comprises a VH having an amino acid sequence having at least 95% identity to an amino acid sequence of SEQ ID NO:1052. In some embodiments, the second binding domain that binds to BCMA comprises a VL having an amino acid sequence having at least 95% identity to an amino acid sequence of SEQ ID NO:1053. In some embodiments, the second binding domain that binds to BCMA comprises a VH having an amino acid sequence having at least 95% identity to an amino acid sequence of SEQ ID NO:1052, and a VL having an amino acid sequence having at least 95% identity to an amino acid sequence of SEQ ID NO:1053.

[0215] In some embodiments, the second binding domain binds to PSMA. In some embodiments, the second binding domain that binds to PSMA comprises VH CDR1, VH CDR2, and VH CDR3 amino acid sequences of a PSMA antibody provided herein. In some embodiments, the second binding domain that binds to PSMA comprises VL CDR1, VL CDR2 and VL CDR3 amino acid sequences of a PSMA antibody provided herein. In some embodiments, the second binding domain that binds to PSMA comprises VH CDR1, VH CDR2, VH CDR3, VL CDR1, VL CDR2 and VL CDR3 amino acid sequences of a PSMA antibody provided herein. In other embodiments, the second binding domain that binds to PSMA comprises VH amino acid sequence of a PSMA antibody provided herein. In other embodiments, the second binding domain that binds to PSMA comprises a VL amino acid sequence of a PSMA antibody provided herein. In other embodiments, the second binding domain that binds to PSMA comprises VH and VL amino acid sequences of a PSMA antibody provided herein. In other embodiments, the second binding domain that binds to PSMA comprises heavy chain amino acid sequence of a PSMA antibody provided herein. In other embodiments, the second binding domain that binds to PSMA comprises a light chain amino acid sequence of a PSMA antibody provided herein. In other embodiments, the second binding domain that binds to PSMA comprises heavy chain and light chain amino acid sequences of a PSMA antibody provided herein. In some embodiments, the PSMA antibody is clone PSMB410. Other PSMA antibodies, including antigen binding fragments thereof, are also contemplated as the second binding arm that binds to PSMA in the trispecific antibodies provided herein.

[0216] In some embodiments, the second binding domain binds to PSMA. In some embodiments, the second binding domain that binds to PSMA comprises: (i) a VH comprising a VH CDR1 having an amino acid sequence of SEQ ID NO:1019, a VH CDR2 having an amino acid sequence of SEQ ID NO:1020, and a VH CDR3 having an amino acid sequence of SEQ ID NO:1021; and (ii) a VL comprising a VL CDR1 having an amino acid sequence of SEQ ID NO:1034, a VL CDR2 having an amino acid sequence of SEQ ID NO:1035, and a VL CDR3 having an amino acid sequence of SEQ ID NO:1036. In some embodiments, the second binding domain that binds to PSMA comprises: (i) a VH comprising a VH CDR1 having an amino acid sequence of SEQ ID NO:1022, a VH CDR2 having an amino acid sequence of SEQ ID NO:1023, and a VH CDR3 having an amino acid sequence of SEQ ID NO:1024; and (ii) a VL comprising a VL CDR1 having an amino acid sequence of SEQ ID NO:1037, a VL CDR2 having an amino acid sequence of SEQ ID NO:1038, and a VL CDR3 having an amino acid sequence of SEQ ID NO:1039. In some embodiments, the second binding domain that binds to PSMA comprises: (i) a VH comprising a VH CDR1 having an amino acid sequence of SEQ ID NO:1016, a VH CDR2 having an amino acid sequence of SEQ ID NO:1017, and a VH CDR3 having an amino acid sequence of SEQ ID NO:1018; and (ii) a VL comprising a VL CDR1 having an amino acid sequence of SEQ ID NO:1031, a VL CDR2 having an amino acid sequence of SEQ ID NO:1032, and a VL CDR3 having an amino acid sequence of SEQ ID NO:1033. In some embodiments, the second binding domain that binds to PSMA comprises: (i) a VH comprising a VH CDR1 having an amino acid sequence of SEQ ID NO:1028, a VH CDR2 having an amino acid sequence of SEQ ID NO:1029, and a VH CDR3 having an amino acid sequence of SEQ ID NO:1030; and (ii) a VL comprising a VL CDR1 having an amino acid sequence of SEQ ID NO:1043, a VL CDR2 having an amino acid sequence of SEQ ID NO:1044, and a VL CDR3 having an amino acid sequence of SEQ ID NO:1045. In some embodiments, the second binding domain that binds to PSMA comprises: (i) a VH comprising a VH CDR1 having an amino acid sequence of SEQ ID NO:1025, a VH CDR2 having an amino acid sequence of SEQ ID NO:1026, and a VH CDR3 having an amino acid sequence of SEQ ID NO:1027; and (ii) a VL comprising a VL CDR1 having an amino acid sequence of SEQ ID NO:1040, a VL CDR2 having an amino acid sequence of SEQ ID NO:1041, and a VL CDR3 having an amino acid sequence of SEQ ID NO:1042. In some embodiments, the second binding domain that binds to PSMA comprises: a VH comprising a VH CDR1, a VH CDR2, and a VH CDR3 having an amino acid sequence of a VH CDR1, VH CDR2, and VH CDR3, respectively, of SEQ ID NO:1046. In some embodiments, the second binding domain that binds to PSMA comprises: a VL comprising a VL CDR1, a VL CDR2, and a VL CDR3 having an amino acid sequence of a VL CDR1, VL CDR2, and VL CDR3, respectively, of SEQ ID NO:1047. In some embodiments, the second binding domain that binds to PSMA comprises: (i) a VH comprising a VH CDR1, a VH CDR2, and a VH CDR3 having an amino acid sequence of a VH CDR1, VH CDR2, and VH CDR3, respectively, of SEQ ID NO:1046; and (ii) a VL comprising a VL CDR1, a VL CDR2, and a VL CDR3 having an amino acid sequence of a VL CDR1, VL CDR2, and VL CDR3, respectively, of SEQ ID NO:1047. In some embodiments, the second binding domain that binds to PSMA comprises a VH having an amino acid sequence of SEQ ID NO:1046. In some embodiments, the second binding domain that binds to PSMA comprises a VL having an amino acid sequence of SEQ ID NO:1047. In some embodiments, the second binding domain that binds to PSMA comprises a VH having an amino acid sequence of SEQ ID NO:1046, and a VL having an amino acid sequence of SEQ ID NO:1047. In some embodiments, the second binding domain that binds to PSMA comprises a VH having an amino acid sequence having at least 95% identity to an amino acid sequence of SEQ ID NO:1046. In some embodiments, the second binding domain that binds to PSMA comprises a VL having an amino acid sequence having at least 95% identity to an amino acid sequence of SEQ ID NO:1047. In some embodiments, the second binding domain that binds to PSMA comprises a VH having an amino acid sequence having at least 95% identity to an amino acid sequence of SEQ ID NO:1046, and a VL having an amino acid sequence having at least 95% identity to an amino acid sequence of SEQ ID NO:1047.

[0217] In some embodiments, the third binding domain that binds to CD28 comprises VH CDR1, VH CDR2, and VH CDR3 amino acid sequences of a CD28 antibody provided herein. In some embodiments, the third binding domain that binds to CD28 comprises VL CDR1, VL CDR2 and VL CDR3 amino acid sequences of a CD28 antibody provided herein. In some embodiments, the third binding domain that binds to CD28 comprises VH CDR1, VH CDR2, VH CDR3, VL CDR1, VL CDR2 and VL CDR3 amino acid sequences of a CD28 antibody provided herein. In other embodiments, the third binding domain that binds to CD28 comprises VH amino acid sequence of a CD28 antibody provided herein. In other embodiments, the third binding domain that binds to CD28 comprises a VL amino acid sequence of a CD28 antibody provided herein. In other embodiments, the third binding domain that binds to CD28 comprises VH and VL amino acid sequences of a CD28 antibody provided herein. In other embodiments, the third binding domain that binds to CD28 comprises heavy chain amino acid sequence of a CD28 antibody provided herein. In other embodiments, the third binding domain that binds to CD28 comprises a light chain amino acid sequence of a CD28 antibody provided herein. In other embodiments, the third binding domain that binds to CD28 comprises heavy chain and light chain amino acid sequences of a CD28 antibody provided herein. In some embodiments, the CD28 antibody is clone C28B11. In some embodiments, the CD28 antibody is clone C28B19. In some embodiments, the CD28 antibody is clone C28B103. In some embodiments, the CD28 antibody is clone C28B105. Other CD28 antibodies, including antigen binding fragments thereof, are also contemplated as the third binding arm that binds to CD28 in the trispecific antibodies provided herein.

[0218] In some embodiments, the third binding domain that binds to CD28 comprises: (i) a VH comprising a VH CDR1 having an amino acid sequence of SEQ ID NO:702, a VH CDR2 having an amino acid sequence of SEQ ID NO:708, and a VH CDR3 having an amino acid sequence of SEQ ID NO:714; and (ii) a VL comprising a VL CDR1 having an amino acid sequence of SEQ ID NO:794, a VL CDR2 having an amino acid sequence of SEQ ID NO:800, and a VL CDR3 having an amino acid sequence of SEQ ID NO:806. In some embodiments, the third binding domain that binds to CD28 comprises: (i) a VH comprising a VH CDR1 having an amino acid sequence of SEQ ID NO:721, a VH CDR2 having an amino acid sequence of SEQ ID NO:727, and a VH CDR3 having an amino acid sequence of SEQ ID NO:733; and (ii) a VL comprising a VL CDR1 having an amino acid sequence of SEQ ID NO:812, a VL CDR2 having an amino acid sequence of SEQ ID NO:818, and a VL CDR3 having an amino acid sequence of SEQ ID NO:824. In some embodiments, the third binding domain that binds to CD28 comprises: (i) a VH comprising a VH CDR1 having an amino acid sequence of SEQ ID NO:739, a VH CDR2 having an amino acid sequence of SEQ ID NO:746, and a VH CDR3 having an amino acid sequence of SEQ ID NO:752; and (ii) a VL comprising a VL CDR1 having an amino acid sequence of SEQ ID NO:830, a VL CDR2 having an amino acid sequence of SEQ ID NO:836, and a VL CDR3 having an amino acid sequence of SEQ ID NO:842. In some embodiments, the third binding domain that binds to CD28 comprises: (i) a VH comprising a VH CDR1 having an amino acid sequence of SEQ ID NO:758, a VH CDR2 having an amino acid sequence of SEQ ID NO:764, and a VH CDR3 having an amino acid sequence of SEQ ID NO:770; and (ii) a VL comprising a VL CDR1 having an amino acid sequence of SEQ ID NO:848, a VL CDR2 having an amino acid sequence of SEQ ID NO:854, and a VL CDR3 having an amino acid sequence of SEQ ID NO:860. In some embodiments, the third binding domain that binds to CD28 comprises: (i) a VH comprising a VH CDR1 having an amino acid sequence of SEQ ID NO:776, a VH CDR2 having an amino acid sequence of SEQ ID NO:782, and a VH CDR3 having an amino acid sequence of SEQ ID NO:788; and (ii) a VL comprising a VL CDR1 having an amino acid sequence of SEQ ID NO:866, a VL CDR2 having an amino acid sequence of SEQ ID NO:872, and a VL CDR3 having an amino acid sequence of SEQ ID NO:878. In some embodiments, the third binding domain that binds to CD28 comprises: (i) a VH comprising a VH CDR1, a VH CDR2, and a VH CDR3 having an amino acid sequence of a VH CDR1, VH CDR2, and VH CDR3, respectively, of SEQ ID NO:690; and (ii) a VL comprising a VL CDR1, a VL CDR2, and a VL CDR3 having an amino acid sequence of a VL CDR1, VL CDR2, and VL CDR3, respectively, of SEQ ID NO:696. In some embodiments, the third binding domain that binds to CD28 comprises a VH having an amino acid sequence of SEQ ID NO:690. In some embodiments, the third binding domain that binds to CD28 comprises a VL having an amino acid sequence of SEQ ID NO:696. In some embodiments, the third binding domain that binds to CD28 comprises a VH having an amino acid sequence of SEQ ID NO:690, and a VL having an amino acid sequence of SEQ ID NO:696. In some embodiments, the third binding domain that binds to CD28 comprises a VH having an amino acid sequence having at least 95% identity to an amino acid sequence of SEQ ID NO:690. In some embodiments, the third binding domain that binds to CD28 comprises a VL having an amino acid sequence having at least 95% identity to an amino acid sequence of SEQ ID NO:696. In some embodiments, the third binding domain that binds to CD28 comprises a VH having an amino acid sequence having at least 95% identity to an amino acid sequence of SEQ ID NO:690, and a VL having an amino acid sequence having at least 95% identity to an amino acid sequence of SEQ ID NO:696.

[0219] In some embodiments, the third binding domain that binds to CD28 comprises: (i) a VH comprising a VH CDR1 having an amino acid sequence of SEQ ID NO:703, a VH CDR2 having an amino acid sequence of SEQ ID NO:709, and a VH CDR3 having an amino acid sequence of SEQ ID NO:715; and (ii) a VL comprising a VL CDR1 having an amino acid sequence of SEQ ID NO:795, a VL CDR2 having an amino acid sequence of SEQ ID NO:801, and a VL CDR3 having an amino acid sequence of SEQ ID NO:807. In some embodiments, the third binding domain that binds to CD28 comprises: (i) a VH comprising a VH CDR1 having an amino acid sequence of SEQ ID NO:722, a VH CDR2 having an amino acid sequence of SEQ ID NO:728, and a VH CDR3 having an amino acid sequence of SEQ ID NO:734; and (ii) a VL comprising a VL CDR1 having an amino acid sequence of SEQ ID NO:813, a VL CDR2 having an amino acid sequence of SEQ ID NO:819, and a VL CDR3 having an amino acid sequence of SEQ ID NO:825. In some embodiments, the third binding domain that binds to CD28 comprises: (i) a VH comprising a VH CDR1 having an amino acid sequence of SEQ ID NO:740, a VH CDR2 having an amino acid sequence of SEQ ID NO:747, and a VH CDR3 having an amino acid sequence of SEQ ID NO:753; and (ii) a VL comprising a VL CDR1 having an amino acid sequence of SEQ ID NO:831, a VL CDR2 having an amino acid sequence of SEQ ID NO:837, and a VL CDR3 having an amino acid sequence of SEQ ID NO:843. In some embodiments, the third binding domain that binds to CD28 comprises: (i) a VH comprising a VH CDR1 having an amino acid sequence of SEQ ID NO:759, a VH CDR2 having an amino acid sequence of SEQ ID NO:765, and a VH CDR3 having an amino acid sequence of SEQ ID NO:771; and (ii) a VL comprising a VL CDR1 having an amino acid sequence of SEQ ID NO:849, a VL CDR2 having an amino acid sequence of SEQ ID NO:855, and a VL CDR3 having an amino acid sequence of SEQ ID NO:861. In some embodiments, the third binding domain that binds to CD28 comprises: (i) a VH comprising a VH CDR1 having an amino acid sequence of SEQ ID NO:777, a VH CDR2 having an amino acid sequence of SEQ ID NO:783, and a VH CDR3 having an amino acid sequence of SEQ ID NO:789; and (ii) a VL comprising a VL CDR1 having an amino acid sequence of SEQ ID NO:867, a VL CDR2 having an amino acid sequence of SEQ ID NO:873, and a VL CDR3 having an amino acid sequence of SEQ ID NO:879. In some embodiments, the third binding domain that binds to CD28 comprises: (i) a VH comprising a VH CDR1, a VH CDR2, and a VH CDR3 having an amino acid sequence of a VH CDR1, VH CDR2, and VH CDR3, respectively, of SEQ ID NO:691; and (ii) a VL comprising a VL CDR1, a VL CDR2, and a VL CDR3 having an amino acid sequence of a VL CDR1, VL CDR2, and VL CDR3, respectively, of SEQ ID NO:697. In some embodiments, the third binding domain that binds to CD28 comprises a VH having an amino acid sequence of SEQ ID NO:691. In some embodiments, the third binding domain that binds to CD28 comprises a VL having an amino acid sequence of SEQ ID NO:697. In some embodiments, the third binding domain that binds to CD28 comprises a VH having an amino acid sequence of SEQ ID NO:691, and a VL having an amino acid sequence of SEQ ID NO:697. In some embodiments, the third binding domain that binds to CD28 comprises a VH having an amino acid sequence having at least 95% identity to an amino acid sequence of SEQ ID NO:691. In some embodiments, the third binding domain that binds to CD28 comprises a VL having an amino acid sequence having at least 95% identity to an amino acid sequence of SEQ ID NO:697. In some embodiments, the third binding domain that binds to CD28 comprises a VH having an amino acid sequence having at least 95% identity to an amino acid sequence of SEQ ID NO:691, and a VL having an amino acid sequence having at least 95% identity to an amino acid sequence of SEQ ID NO:697.

[0220] In some embodiments, the third binding domain that binds to CD28 comprises: (i) a VH comprising a VH CDR1 having an amino acid sequence of SEQ ID NO:704, a VH CDR2 having an amino acid sequence of SEQ ID NO:710, and a VH CDR3 having an amino acid sequence of SEQ ID NO:716; and (ii) a VL comprising a VL CDR1 having an amino acid sequence of SEQ ID NO:796, a VL CDR2 having an amino acid sequence of SEQ ID NO:802, and a VL CDR3 having an amino acid sequence of SEQ ID NO:808. In some embodiments, the third binding domain that binds to CD28 comprises: (i) a VH comprising a VH CDR1 having an amino acid sequence of SEQ ID NO:723, a VH CDR2 having an amino acid sequence of SEQ ID NO:729, and a VH CDR3 having an amino acid sequence of SEQ ID NO:735; and (ii) a VL comprising a VL CDR1 having an amino acid sequence of SEQ ID NO:814, a VL CDR2 having an amino acid sequence of SEQ ID NO:820, and a VL CDR3 having an amino acid sequence of SEQ ID NO:826. In some embodiments, the third binding domain that binds to CD28 comprises: (i) a VH comprising a VH CDR1 having an amino acid sequence of SEQ ID NO:741, a VH CDR2 having an amino acid sequence of SEQ ID NO:748, and a VH CDR3 having an amino acid sequence of SEQ ID NO:754; and (ii) a VL comprising a VL CDR1 having an amino acid sequence of SEQ ID NO:832, a VL CDR2 having an amino acid sequence of SEQ ID NO:838, and a VL CDR3 having an amino acid sequence of SEQ ID NO:844. In some embodiments, the third binding domain that binds to CD28 comprises: (i) a VH comprising a VH CDR1 having an amino acid sequence of SEQ ID NO:760, a VH CDR2 having an amino acid sequence of SEQ ID NO:766, and a VH CDR3 having an amino acid sequence of SEQ ID NO:772; and (ii) a VL comprising a VL CDR1 having an amino acid sequence of SEQ ID NO:850, a VL CDR2 having an amino acid sequence of SEQ ID NO:856, and a VL CDR3 having an amino acid sequence of SEQ ID NO:862. In some embodiments, the third binding domain that binds to CD28 comprises: (i) a VH comprising a VH CDR1 having an amino acid sequence of SEQ ID NO:778, a VH CDR2 having an amino acid sequence of SEQ ID NO:784, and a VH CDR3 having an amino acid sequence of SEQ ID NO:790; and (ii) a VL comprising a VL CDR1 having an amino acid sequence of SEQ ID NO:868, a VL CDR2 having an amino acid sequence of SEQ ID NO:874, and a VL CDR3 having an amino acid sequence of SEQ ID NO:880. In some embodiments, the third binding domain that binds to CD28 comprises: (i) a VH comprising a VH CDR1, a VH CDR2, and a VH CDR3 having an amino acid sequence of a VH CDR1, VH CDR2, and VH CDR3, respectively, of SEQ ID NO:692; and (ii) a VL comprising a VL CDR1, a VL CDR2, and a VL CDR3 having an amino acid sequence of a VL CDR1, VL CDR2, and VL CDR3, respectively, of SEQ ID NO:698. In some embodiments, the third binding domain that binds to CD28 comprises a VH having an amino acid sequence of SEQ ID NO:692. In some embodiments, the third binding domain that binds to CD28 comprises a VL having an amino acid sequence of SEQ ID NO:698. In some embodiments, the third binding domain that binds to CD28 comprises a VH having an amino acid sequence of SEQ ID NO:692, and a VL having an amino acid sequence of SEQ ID NO:698. In some embodiments, the third binding domain that binds to CD28 comprises a VH having an amino acid sequence having at least 95% identity to an amino acid sequence of SEQ ID NO:692. In some embodiments, the third binding domain that binds to CD28 comprises a VL having an amino acid sequence having at least 95% identity to an amino acid sequence of SEQ ID NO:698. In some embodiments, the third binding domain that binds to CD28 comprises a VH having an amino acid sequence having at least 95% identity to an amino acid sequence of SEQ ID NO:692, and a VL having an amino acid sequence having at least 95% identity to an amino acid sequence of SEQ ID NO:698.

[0221] In some embodiments, the third binding domain that binds to CD28 comprises: (i) a VH comprising a VH CDR1 having an amino acid sequence of SEQ ID NO:705, a VH CDR2 having an amino acid sequence of SEQ ID NO:711, and a VH CDR3 having an amino acid sequence of SEQ ID NO:717; and (ii) a VL comprising a VL CDR1 having an amino acid sequence of SEQ ID NO:797, a VL CDR2 having an amino acid sequence of SEQ ID NO:803, and a VL CDR3 having an amino acid sequence of SEQ ID NO:809. In some embodiments, the third binding domain that binds to CD28 comprises: (i) a VH comprising a VH CDR1 having an amino acid sequence of SEQ ID NO:724, a VH CDR2 having an amino acid sequence of SEQ ID NO:730, and a VH CDR3 having an amino acid sequence of SEQ ID NO:736; and (ii) a VL comprising a VL CDR1 having an amino acid sequence of SEQ ID NO:815, a VL CDR2 having an amino acid sequence of SEQ ID NO:821, and a VL CDR3 having an amino acid sequence of SEQ ID NO:827. In some embodiments, the third binding domain that binds to CD28 comprises: (i) a VH comprising a VH CDR1 having an amino acid sequence of SEQ ID NO:742, a VH CDR2 having an amino acid sequence of SEQ ID NO:749, and a VH CDR3 having an amino acid sequence of SEQ ID NO:755; and (ii) a VL comprising a VL CDR1 having an amino acid sequence of SEQ ID NO:833, a VL CDR2 having an amino acid sequence of SEQ ID NO:839, and a VL CDR3 having an amino acid sequence of SEQ ID NO:845. In some embodiments, the third binding domain that binds to CD28 comprises: (i) a VH comprising a VH CDR1 having an amino acid sequence of SEQ ID NO:761, a VH CDR2 having an amino acid sequence of SEQ ID NO:767, and a VH CDR3 having an amino acid sequence of SEQ ID NO:773; and (ii) a VL comprising a VL CDR1 having an amino acid sequence of SEQ ID NO:851, a VL CDR2 having an amino acid sequence of SEQ ID NO:857, and a VL CDR3 having an amino acid sequence of SEQ ID NO:863. In some embodiments, the third binding domain that binds to CD28 comprises: (i) a VH comprising a VH CDR1 having an amino acid sequence of SEQ ID NO:779, a VH CDR2 having an amino acid sequence of SEQ ID NO:785, and a VH CDR3 having an amino acid sequence of SEQ ID NO:791; and (ii) a VL comprising a VL CDR1 having an amino acid sequence of SEQ ID NO:869, a VL CDR2 having an amino acid sequence of SEQ ID NO:875, and a VL CDR3 having an amino acid sequence of SEQ ID NO: 881. In some embodiments, the third binding domain that binds to CD28 comprises: (i) a VH comprising a VH CDR1, a VH CDR2, and a VH CDR3 having an amino acid sequence of a VH CDR1, VH CDR2, and VH CDR3, respectively, of SEQ ID NO:693; and (ii) a VL comprising a VL CDR1, a VL CDR2, and a VL CDR3 having an amino acid sequence of a VL CDR1, VL CDR2, and VL CDR3, respectively, of SEQ ID NO:699. In some embodiments, the third binding domain that binds to CD28 comprises a VH having an amino acid sequence of SEQ ID NO:693. In some embodiments, the third binding domain that binds to CD28 comprises a VL having an amino acid sequence of SEQ ID NO:699. In some embodiments, the third binding domain that binds to CD28 comprises a VH having an amino acid sequence of SEQ ID NO:693, and a VL having an amino acid sequence of SEQ ID NO:699. In some embodiments, the third binding domain that binds to CD28 comprises a VH having an amino acid sequence having at least 95% identity to an amino acid sequence of SEQ ID NO:693. In some embodiments, the third binding domain that binds to CD28 comprises a VL having an amino acid sequence having at least 95% identity to an amino acid sequence of SEQ ID NO:699. In some embodiments, the third binding domain that binds to CD28 comprises a VH having an amino acid sequence having at least 95% identity to an amino acid sequence of SEQ ID NO:693, and a VL having an amino acid sequence having at least 95% identity to an amino acid sequence of SEQ ID NO:699.

[0222] In some embodiments, the trispecific antibodies provided herein have a heavy chain having an amino acid sequence of SEQ ID NO:882. In some embodiments, the trispecific antibodies provided herein have a heavy chain having an amino acid sequence of SEQ ID NO:883. In some embodiments, the trispecific antibodies provided herein have a heavy chain having an amino acid sequence of SEQ ID NO:884. In some embodiments, the trispecific antibodies provided herein have a heavy chain having an amino acid sequence of SEQ ID NO:885. In some embodiments, the trispecific antibodies provided herein have a heavy chain having an amino acid sequence of SEQ ID NO:886. In some embodiments, the trispecific antibodies provided herein have a heavy chain having an amino acid sequence of SEQ ID NO:887. In some embodiments, the trispecific antibodies provided herein have a heavy chain having an amino acid sequence of SEQ ID NO:888. In some embodiments, the trispecific antibodies provided herein have a heavy chain having an amino acid sequence of SEQ ID NO:889. In some embodiments, the trispecific antibodies provided herein have a heavy chain having an amino acid sequence of SEQ ID NO:890. In some embodiments, the trispecific antibodies provided herein have a heavy chain having an amino acid sequence of SEQ ID NO:891.

[0223] In some embodiments, the trispecific antibodies provided herein have a heavy chain having an amino acid sequence of SEQ ID NO:892. In some embodiments, the trispecific antibodies provided herein have a heavy chain having an amino acid sequence of SEQ ID NO:893. In some embodiments, the trispecific antibodies provided herein have a heavy chain having an amino acid sequence of SEQ ID NO:894. In some embodiments, the trispecific antibodies provided herein have a heavy chain having an amino acid sequence of SEQ ID NO:895. In some embodiments, the trispecific antibodies provided herein have a heavy chain having an amino acid sequence of SEQ ID NO:896. In some embodiments, the trispecific antibodies provided herein have a heavy chain having an amino acid sequence of SEQ ID NO:897. In some embodiments, the trispecific antibodies provided herein have a heavy chain having an amino acid sequence of SEQ ID NO:898. In some embodiments, the trispecific antibodies provided herein have a heavy chain having an amino acid sequence of SEQ ID NO:899. In some embodiments, the trispecific antibodies provided herein have a heavy chain having an amino acid sequence of SEQ ID NO:900. In some embodiments, the trispecific antibodies provided herein have a heavy chain having an amino acid sequence of SEQ ID NO:901.

[0224] In some embodiments, the trispecific antibodies provided herein have a light chain having an amino acid sequence of SEQ ID NO:902. In some embodiments, the trispecific antibodies provided herein have a light chain having an amino acid sequence of SEQ ID NO:903. In some embodiments, the trispecific antibodies provided herein have a light chain having an amino acid sequence of SEQ ID NO:904. In some embodiments, the trispecific antibodies provided herein have a light chain having an amino acid sequence of SEQ ID NO:905. In some embodiments, the trispecific antibodies provided herein have a light chain having an amino acid sequence of SEQ ID NO:906. In some embodiments, the trispecific antibodies provided herein have a light chain having an amino acid sequence of SEQ ID NO:907. In some embodiments, the trispecific antibodies provided herein have a light chain having an amino acid sequence of SEQ ID NO:908. In some embodiments, the trispecific antibodies provided herein have a light chain having an amino acid sequence of SEQ ID NO:909. In some embodiments, the trispecific antibodies provided herein have a light chain having an amino acid sequence of SEQ ID NO:910. In some embodiments, the trispecific antibodies provided herein have a light chain having an amino acid sequence of SEQ ID NO:911.

[0225] In some embodiments, the trispecific antibodies provided herein have a light chain having an amino acid sequence of SEQ ID NO:912. In some embodiments, the trispecific antibodies provided herein have a light chain having an amino acid sequence of SEQ ID NO:913. In some embodiments, the trispecific antibodies provided herein have a light chain having an amino acid sequence of SEQ ID NO:914. In some embodiments, the trispecific antibodies provided herein have a light chain having an amino acid sequence of SEQ ID NO:915. In some embodiments, the trispecific antibodies provided herein have a light chain having an amino acid sequence of SEQ ID NO:916. In some embodiments, the trispecific antibodies provided herein have a light chain having an amino acid sequence of SEQ ID NO:917. In some embodiments, the trispecific antibodies provided herein have a light chain having an amino acid sequence of SEQ ID NO:918. In some embodiments, the trispecific antibodies provided herein have a light chain having an amino acid sequence of SEQ ID NO:919. In some embodiments, the trispecific antibodies provided herein have a light chain having an amino acid sequence of SEQ ID NO:920. In some embodiments, the trispecific antibodies provided herein have a light chain having an amino acid sequence of SEQ ID NO:921.

[0226] In some embodiments, the trispecific antibodies provided herein have a heavy chain having an amino acid sequence of SEQ ID NO:942. In some embodiments, the trispecific antibodies provided herein have a light chain having an amino acid sequence of SEQ ID NO:965. In some embodiments, the trispecific antibodies provided herein have a heavy chain having an amino acid sequence of SEQ ID NO:1049.

[0227] In some embodiments, the trispecific antibodies provided herein have a heavy chain having an amino acid sequence of SEQ ID NO:943. In some embodiments, the trispecific antibodies provided herein have a light chain having an amino acid sequence of SEQ ID NO:966.

[0228] In some embodiments, the trispecific antibodies provided herein have a heavy chain having an amino acid sequence of SEQ ID NO:944. In some embodiments, the trispecific antibodies provided herein have a light chain having an amino acid sequence of SEQ ID NO:967. In some embodiments, the trispecific antibodies provided herein have a heavy chain having an amino acid sequence of SEQ ID NO:980. In some embodiments, the trispecific antibodies provided herein have a light chain having an amino acid sequence of SEQ ID NO:1001.

[0229] In some embodiments, the trispecific antibodies provided herein have a heavy chain having an amino acid sequence of SEQ ID NO:945. In some embodiments, the trispecific antibodies provided herein have a light chain having an amino acid sequence of SEQ ID NO:968. In some embodiments, the trispecific antibodies provided herein have a heavy chain having an amino acid sequence of SEQ ID NO:981. In some embodiments, the trispecific antibodies provided herein have a light chain having an amino acid sequence of SEQ ID NO:1002.

[0230] In some embodiments, the trispecific antibodies provided herein have a heavy chain having an amino acid sequence of SEQ ID NO:946. In some embodiments, the trispecific antibodies provided herein have a light chain having an amino acid sequence of SEQ ID NO:969. In some embodiments, the trispecific antibodies provided herein have a heavy chain having an amino acid sequence of SEQ ID NO:982. In some embodiments, the trispecific antibodies provided herein have a light chain having an amino acid sequence of SEQ ID NO:1003.

[0231] In some embodiments, the trispecific antibodies provided herein have a heavy chain having an amino acid sequence of SEQ ID NO:947. In some embodiments, the trispecific antibodies provided herein have a light chain having an amino acid sequence of SEQ ID NO:970. In some embodiments, the trispecific antibodies provided herein have a heavy chain having an amino acid sequence of SEQ ID NO:983. In some embodiments, the trispecific antibodies provided herein have a light chain having an amino acid sequence of SEQ ID NO:1004.

[0232] In some embodiments, the trispecific antibodies provided herein have a heavy chain having an amino acid sequence of SEQ ID NO:948. In some embodiments, the trispecific antibodies provided herein have a light chain having an amino acid sequence of SEQ ID NO:971. In some embodiments, the trispecific antibodies provided herein have a heavy chain having an amino acid sequence of SEQ ID NO:984. In some embodiments, the trispecific antibodies provided herein have a light chain having an amino acid sequence of SEQ ID NO:1005.

[0233] In some embodiments, the trispecific antibodies provided herein have a heavy chain having an amino acid sequence of SEQ ID NO:949. In some embodiments, the trispecific antibodies provided herein have a light chain having an amino acid sequence of SEQ ID NO:972. In some embodiments, the trispecific antibodies provided herein have a heavy chain having an amino acid sequence of SEQ ID NO:985. In some embodiments, the trispecific antibodies provided herein have a light chain having an amino acid sequence of SEQ ID NO:1006.

[0234] In some embodiments, the trispecific antibodies provided herein have a heavy chain having an amino acid sequence of SEQ ID NO:950. In some embodiments, the trispecific antibodies provided herein have a light chain having an amino acid sequence of SEQ ID NO:973. In some embodiments, the trispecific antibodies provided herein have a heavy chain having an amino acid sequence of SEQ ID NO:986.

[0235] In some embodiments, the trispecific antibodies provided herein have a heavy chain having an amino acid sequence of SEQ ID NO:951. In some embodiments, the trispecific antibodies provided herein have a light chain having an amino acid sequence of SEQ ID NO:974. In some embodiments, the trispecific antibodies provided herein have a heavy chain having an amino acid sequence of SEQ ID NO:987.

[0236] In some embodiments, the trispecific antibodies provided herein have a heavy chain having an amino acid sequence of SEQ ID NO:952. In some embodiments, the trispecific antibodies provided herein have a light chain having an amino acid sequence of SEQ ID NO:975. In some embodiments, the trispecific antibodies provided herein have a heavy chain having an amino acid sequence of SEQ ID NO:988.

[0237] In some embodiments, the trispecific antibodies provided herein have a heavy chain having an amino acid sequence of SEQ ID NO:953. In some embodiments, the trispecific antibodies provided herein have a light chain having an amino acid sequence of SEQ ID NO:976. In some embodiments, the trispecific antibodies provided herein have a heavy chain having an amino acid sequence of SEQ ID NO:989.

[0238] In some embodiments, the trispecific antibodies provided herein have a heavy chain having an amino acid sequence of SEQ ID NO:954. In some embodiments, the trispecific antibodies provided herein have a light chain having an amino acid sequence of SEQ ID NO:977. In some embodiments, the trispecific antibodies provided herein have a heavy chain having an amino acid sequence of SEQ ID NO:990.

[0239] In some embodiments, the trispecific antibodies provided herein have a heavy chain having an amino acid sequence of SEQ ID NO:955. In some embodiments, the trispecific antibodies provided herein have a light chain having an amino acid sequence of SEQ ID NO:978. In some embodiments, the trispecific antibodies provided herein have a heavy chain having an amino acid sequence of SEQ ID NO:991.

[0240] In some embodiments, the trispecific antibodies provided herein have a heavy chain having an amino acid sequence of SEQ ID NO:1048. In some embodiments, the trispecific antibodies provided herein have a heavy chain having an amino acid sequence of SEQ ID NO:1050. In some embodiments, the trispecific antibodies provided herein have a light chain having an amino acid sequence of SEQ ID NO:1051.

[0241] In some embodiments, the trispecific antibodies provided herein have a heavy chain having an amino acid sequence of SEQ ID NO:956. In some embodiments, the trispecific antibodies provided herein have a heavy chain having an amino acid sequence of SEQ ID NO:992. In some embodiments, the trispecific antibodies provided herein have a light chain having an amino acid sequence of SEQ ID NO:1007.

[0242] In some embodiments, the trispecific antibodies provided herein have a heavy chain having an amino acid sequence of SEQ ID NO:957. In some embodiments, the trispecific antibodies provided herein have a heavy chain having an amino acid sequence of SEQ ID NO:993. In some embodiments, the trispecific antibodies provided herein have a light chain having an amino acid sequence of SEQ ID NO:1008.

[0243] In some embodiments, the trispecific antibodies provided herein have a heavy chain having an amino acid sequence of SEQ ID NO:958. In some embodiments, the trispecific antibodies provided herein have a heavy chain having an amino acid sequence of SEQ ID NO:994. In some embodiments, the trispecific antibodies provided herein have a light chain having an amino acid sequence of SEQ ID NO:1009.

[0244] In some embodiments, the trispecific antibodies provided herein have a heavy chain having an amino acid sequence of SEQ ID NO:959. In some embodiments, the trispecific antibodies provided herein have a heavy chain having an amino acid sequence of SEQ ID NO:995. In some embodiments, the trispecific antibodies provided herein have a light chain having an amino acid sequence of SEQ ID NO:1010.

[0245] In some embodiments, the trispecific antibodies provided herein have a heavy chain having an amino acid sequence of SEQ ID NO:960. In some embodiments, the trispecific antibodies provided herein have a heavy chain having an amino acid sequence of SEQ ID NO:996. In some embodiments, the trispecific antibodies provided herein have a light chain having an amino acid sequence of SEQ ID NO:1011.

[0246] In some embodiments, the trispecific antibodies provided herein have a heavy chain having an amino acid sequence of SEQ ID NO:961. In some embodiments, the trispecific antibodies provided herein have a heavy chain having an amino acid sequence of SEQ ID NO:997. In some embodiments, the trispecific antibodies provided herein have a light chain having an amino acid sequence of SEQ ID NO:1012.

[0247] In some embodiments, the trispecific antibodies provided herein have a heavy chain having an amino acid sequence of SEQ ID NO:962. In some embodiments, the trispecific antibodies provided herein have a heavy chain having an amino acid sequence of SEQ ID NO:998. In some embodiments, the trispecific antibodies provided herein have a light chain having an amino acid sequence of SEQ ID NO:1013.

[0248] In some embodiments, the trispecific antibodies provided herein have a heavy chain having an amino acid sequence of SEQ ID NO:963. In some embodiments, the trispecific antibodies provided herein have a heavy chain having an amino acid sequence of SEQ ID NO:999. In some embodiments, the trispecific antibodies provided herein have a light chain having an amino acid sequence of SEQ ID NO:1014.

[0249] In some embodiments, the trispecific antibodies provided herein have a heavy chain having an amino acid sequence of SEQ ID NO:964. In some embodiments, the trispecific antibodies provided herein have a heavy chain having an amino acid sequence of SEQ ID NO:1000. In some embodiments, the trispecific antibodies provided herein have a light chain having an amino acid sequence of SEQ ID NO:1015.

[0250] In one aspect, provided herein is a trispecific antibody comprising: (a) a first binding domain that binds to Vβ17, (b) a second binding domain that binds to a second target, and (c) a third binding domain that binds to CD28.

[0251] In some embodiments, the first binding domain that binds to Vβ17 comprises a VH CDR1, VH CDR2, and VH CDR3 of a Vβ17 antibody provided herein. In some embodiments, the first binding domain that binds to Vβ17 comprises a VL CDR1, VL CDR2, and VL CDR3 of a Vβ17 antibody provided herein. In some embodiments, the first binding domain that binds to Vβ17 comprises a VH CDR1, VH CDR2, VH CDR3, VL CDR1, VL CDR2, and VL CDR3 of a Vβ17 antibody provided herein.

[0252] In some embodiments, the first binding domain that binds to Vβ17 comprises: a VH comprising a VH CDR1, a VH CDR2, and a VH CDR3 having an amino acid sequence of a VH CDR1, VH CDR2, and VH CDR3, respectively, of SEQ ID NO:25. In some embodiments, the first binding domain that binds to Vβ17 comprises: a VL comprising a VL CDR1, a VL CDR2, and a VL CDR3 having an amino acid sequence of a VL CDR1, VL CDR2, and VL CDR3, respectively, of SEQ ID NO:26. In some embodiments, the first binding domain that binds to Vβ17 comprises a VH having an amino acid sequence of SEQ ID NO:25. In some embodiments, the first binding domain that binds to Vβ17 comprises: (i) a VH comprising a VH CDR1, a VH CDR2, and a VH CDR3 having an amino acid sequence of a VH CDR1, VH CDR2, and VH CDR3, respectively, of SEQ ID NO:25; and (ii) a VL comprising a VL CDR1, a VL CDR2, and a VL CDR3 having an amino acid sequence of a VL CDR1, VL CDR2, and VL CDR3, respectively, of SEQ ID NO:26. In some embodiments, the first binding domain that binds to Vβ17 comprises a VH having an amino acid sequence of SEQ ID NO:25. In some embodiments, the first binding domain that binds to Vβ17 comprises a VL having an amino acid sequence of SEQ ID NO:26. In some embodiments, the first binding domain that binds to Vβ17 comprises a VH having an amino acid sequence of SEQ ID NO:25, and a VL having an amino acid sequence of SEQ ID NO:26. In some embodiments, the first binding domain that binds to Vβ17 comprises a VH having an amino acid sequence having at least 95% identity to an amino acid sequence of SEQ ID NO:25. In some embodiments, the first binding domain that binds to Vβ17 comprises a VL having an amino acid sequence having at least 95% identity to an amino acid sequence of SEQ ID NO:26. In some embodiments, the first binding domain that binds to Vβ17 comprises a VH having an amino acid sequence having at least 95% identity to an amino acid sequence of SEQ ID NO:25, and a VL having an amino acid sequence having at least 95% identity to an amino acid sequence of SEQ ID NO:26.

[0253] In some embodiments, the first binding domain that binds to Vβ17 comprises: a VH comprising a VH CDR1, a VH CDR2, and a VH CDR3 having an amino acid sequence of a VH CDR1, VH CDR2, and VH CDR3, respectively, of SEQ ID NO:19. In some embodiments, the first binding domain that binds to Vβ17 comprises: a VL comprising a VL CDR1, a VL CDR2, and a VL CDR3 having an amino acid sequence of a VL CDR1, VL CDR2, and VL CDR3, respectively, of SEQ ID NO:22. In some embodiments, the first binding domain that binds to Vβ17 comprises: (i) a VH comprising a VH CDR1, a VH CDR2, and a VH CDR3 having an amino acid sequence of a VH CDR1, VH CDR2, and VH CDR3, respectively, of SEQ ID NO:19; and (ii) a VL comprising a VL CDR1, a VL CDR2, and a VL CDR3 having an amino acid sequence of a VL CDR1, VL CDR2, and VL CDR3, respectively, of SEQ ID NO:22. In some embodiments, the first binding domain that binds to Vβ17 comprises a VH having an amino acid sequence of SEQ ID NO:19. In some embodiments, the first binding domain that binds to Vβ17 comprises a VL having an amino acid sequence of SEQ ID NO:22. In some embodiments, the first binding domain that binds to Vβ17 comprises a VH having an amino acid sequence of SEQ ID NO:19, and a VL having an amino acid sequence of SEQ ID NO:22. In some embodiments, the first binding domain that binds to Vβ17 comprises a VH having an amino acid sequence having at least 95% identity to an amino acid sequence of SEQ ID NO:19. In some embodiments, the first binding domain that binds to Vβ17 comprises a VL having an amino acid sequence having at least 95% identity to an amino acid sequence of SEQ ID NO:22. In some embodiments, the first binding domain that binds to Vβ17 comprises a VH having an amino acid sequence having at least 95% identity to an amino acid sequence of SEQ ID NO:19, and a VL having an amino acid sequence having at least 95% identity to an amino acid sequence of SEQ ID NO:22.

[0254] In some embodiments, the first binding domain that binds to Vβ17 comprises: a VH comprising a VH CDR1, a VH CDR2, and a VH CDR3 having an amino acid sequence of a VH CDR1, VH CDR2, and VH CDR3, respectively, of SEQ ID NO:20. n some embodiments, the first binding domain that binds to Vβ17 comprises: a VL comprising a VL CDR1, a VL CDR2, and a VL CDR3 having an amino acid sequence of a VL CDR1, VL CDR2, and VL CDR3, respectively, of SEQ ID NO:23. In some embodiments, the first binding domain that binds to Vβ17 comprises: (i) a VH comprising a VH CDR1, a VH CDR2, and a VH CDR3 having an amino acid sequence of a VH CDR1, VH CDR2, and VH CDR3, respectively, of SEQ ID NO:20; and (ii) a VL comprising a VL CDR1, a VL CDR2, and a VL CDR3 having an amino acid sequence of a VL CDR1, VL CDR2, and VL CDR3, respectively, of SEQ ID NO:23. In some embodiments, the first binding domain that binds to Vβ17 comprises a VH having an amino acid sequence of SEQ ID NO:20. In some embodiments, the first binding domain that binds to Vβ17 comprises a VL having an amino acid sequence of SEQ ID NO:23. In some embodiments, the first binding domain that binds to Vβ17 comprises a VH having an amino acid sequence of SEQ ID NO:20, and a VL having an amino acid sequence of SEQ ID NO:23. In some embodiments, the first binding domain that binds to Vβ17 comprises a VH having an amino acid sequence having at least 95% identity to an amino acid sequence of SEQ ID NO:20. In some embodiments, the first binding domain that binds to Vβ17 comprises a VL having an amino acid sequence having at least 95% identity to an amino acid sequence of SEQ ID NO:23. In some embodiments, the first binding domain that binds to Vβ17 comprises a VH having an amino acid sequence having at least 95% identity to an amino acid sequence of SEQ ID NO:20, and a VL having an amino acid sequence having at least 95% identity to an amino acid sequence of SEQ ID NO:23.

[0255] In some embodiments, the first binding domain that binds to Vβ17 comprises: a VH comprising a VH CDR1, a VH CDR2, and a VH CDR3 having an amino acid sequence of a VH CDR1, VH CDR2, and VH CDR3, respectively, of SEQ ID NO:21. In some embodiments, the first binding domain that binds to Vβ17 comprises: a VL comprising a VL CDR1, a VL CDR2, and a VL CDR3 having an amino acid sequence of a VL CDR1, VL CDR2, and VL CDR3, respectively, of SEQ ID NO:24. In some embodiments, the first binding domain that binds to Vβ17 comprises: (i) a VH comprising a VH CDR1, a VH CDR2, and a VH CDR3 having an amino acid sequence of a VH CDR1, VH CDR2, and VH CDR3, respectively, of SEQ ID NO:21; and (ii) a VL comprising a VL CDR1, a VL CDR2, and a VL CDR3 having an amino acid sequence of a VL CDR1, VL CDR2, and VL CDR3, respectively, of SEQ ID NO:24. In some embodiments, the first binding domain that binds to Vβ17 comprises a VH having an amino acid sequence of SEQ ID NO:21. In some embodiments, the first binding domain that binds to Vβ17 comprises a VL having an amino acid sequence of SEQ ID NO:24. In some embodiments, the first binding domain that binds to Vβ17 comprises a VH having an amino acid sequence of SEQ ID NO:21, and a VL having an amino acid sequence of SEQ ID NO:24. In some embodiments, the first binding domain that binds to Vβ17 comprises a VH having an amino acid sequence having at least 95% identity to an amino acid sequence of SEQ ID NO:21. In some embodiments, the first binding domain that binds to Vβ17 comprises a VL having an amino acid sequence having at least 95% identity to an amino acid sequence of SEQ ID NO:24. In some embodiments, the first binding domain that binds to Vβ17 comprises a VH having an amino acid sequence having at least 95% identity to an amino acid sequence of SEQ ID NO:21, and a VL having an amino acid sequence having at least 95% identity to an amino acid sequence of SEQ ID NO:24.

[0256] In some embodiments, the first binding domain that binds to Vβ17 comprises: a VH comprising a VH CDR1, a VH CDR2, and a VH CDR3 having an amino acid sequence of a VH CDR1, VH CDR2, and VH CDR3, respectively, of SEQ ID NO:19. In some embodiments, the first binding domain that binds to Vβ17 comprises: a VL comprising a VL CDR1, a VL CDR2, and a VL CDR3 having an amino acid sequence of a VL CDR1, VL CDR2, and VL CDR3, respectively, of SEQ ID NO:23. In some embodiments, the first binding domain that binds to Vβ17 comprises: (i) a VH comprising a VH CDR1, a VH CDR2, and a VH CDR3 having an amino acid sequence of a VH CDR1, VH CDR2, and VH CDR3, respectively, of SEQ ID NO:19; and (ii) a VL comprising a VL CDR1, a VL CDR2, and a VL CDR3 having an amino acid sequence of a VL CDR1, VL CDR2, and VL CDR3, respectively, of SEQ ID NO:23. In some embodiments, the first binding domain that binds to Vβ17 comprises a VH having an amino acid sequence of SEQ ID NO:19. In some embodiments, the first binding domain that binds to Vβ17 comprises a VL having an amino acid sequence of SEQ ID NO:23. In some embodiments, the first binding domain that binds to Vβ17 comprises a VH having an amino acid sequence of SEQ ID NO:19, and a VL having an amino acid sequence of SEQ ID NO:23. In some embodiments, the first binding domain that binds to Vβ17 comprises a VH having an amino acid sequence having at least 95% identity to an amino acid sequence of SEQ ID NO:19. In some embodiments, the first binding domain that binds to Vβ17 comprises a VL having an amino acid sequence having at least 95% identity to an amino acid sequence of SEQ ID NO:23. In some embodiments, the first binding domain that binds to Vβ17 comprises a VH having an amino acid sequence having at least 95% identity to an amino acid sequence of SEQ ID NO:19, and a VL having an amino acid sequence having at least 95% identity to an amino acid sequence of SEQ ID NO:23.

[0257] In some embodiments, the first binding domain that binds to Vβ17 comprises: a VH comprising a VH CDR1, a VH CDR2, and a VH CDR3 having an amino acid sequence of a VH CDR1, VH CDR2, and VH CDR3, respectively, of SEQ ID NO:19. In some embodiments, the first binding domain that binds to Vβ17 comprises: a VL comprising a VL CDR1, a VL CDR2, and a VL CDR3 having an amino acid sequence of a VL CDR1, VL CDR2, and VL CDR3, respectively, of SEQ ID NO:24. In some embodiments, the first binding domain that binds to Vβ17 comprises: (i) a VH comprising a VH CDR1, a VH CDR2, and a VH CDR3 having an amino acid sequence of a VH CDR1, VH CDR2, and VH CDR3, respectively, of SEQ ID NO:19; and (ii) a VL comprising a VL CDR1, a VL CDR2, and a VL CDR3 having an amino acid sequence of a VL CDR1, VL CDR2, and VL CDR3, respectively, of SEQ ID NO:24. In some embodiments, the first binding domain that binds to Vβ17 comprises a VH having an amino acid sequence of SEQ ID NO:19. In some embodiments, the first binding domain that binds to Vβ17 comprises a VL having an amino acid sequence of SEQ ID NO:24. In some embodiments, the first binding domain that binds to Vβ17 comprises a VH having an amino acid sequence of SEQ ID NO:19, and a VL having an amino acid sequence of SEQ ID NO:24. In some embodiments, the first binding domain that binds to Vβ17 comprises a VH having an amino acid sequence having at least 95% identity to an amino acid sequence of SEQ ID NO:19. In some embodiments, the first binding domain that binds to Vβ17 comprises a VL having an amino acid sequence having at least 95% identity to an amino acid sequence of SEQ ID NO:24. In some embodiments, the first binding domain that binds to Vβ17 comprises a VH having an amino acid sequence having at least 95% identity to an amino acid sequence of SEQ ID NO:19, and a VL having an amino acid sequence having at least 95% identity to an amino acid sequence of SEQ ID NO:24.

[0258] In some embodiments, the first binding domain that binds to Vβ17 comprises: a VH comprising a VH CDR1, a VH CDR2, and a VH CDR3 having an amino acid sequence of a VH CDR1, VH CDR2, and VH CDR3, respectively, of SEQ ID NO:20. In some embodiments, the first binding domain that binds to Vβ17 comprises: a VL comprising a VL CDR1, a VL CDR2, and a VL CDR3 having an amino acid sequence of a VL CDR1, VL CDR2, and VL CDR3, respectively, of SEQ ID NO:22. In some embodiments, the first binding domain that binds to Vβ17 comprises: (i) a VH comprising a VH CDR1, a VH CDR2, and a VH CDR3 having an amino acid sequence of a VH CDR1, VH CDR2, and VH CDR3, respectively, of SEQ ID NO:20; and (ii) a VL comprising a VL CDR1, a VL CDR2, and a VL CDR3 having an amino acid sequence of a VL CDR1, VL CDR2, and VL CDR3, respectively, of SEQ ID NO:22. In some embodiments, the first binding domain that binds to Vβ17 comprises a VH having an amino acid sequence of SEQ ID NO:20. In some embodiments, the first binding domain that binds to Vβ17 comprises a VL having an amino acid sequence of SEQ ID NO:22. In some embodiments, the first binding domain that binds to Vβ17 comprises a VH having an amino acid sequence of SEQ ID NO:20, and a VL having an amino acid sequence of SEQ ID NO:22. In some embodiments, the first binding domain that binds to Vβ17 comprises a VH having an amino acid sequence having at least 95% identity to an amino acid sequence of SEQ ID NO:20. In some embodiments, the first binding domain that binds to Vβ17 comprises a VL having an amino acid sequence having at least 95% identity to an amino acid sequence of SEQ ID NO:22. In some embodiments, the first binding domain that binds to Vβ17 comprises a VH having an amino acid sequence having at least 95% identity to an amino acid sequence of SEQ ID NO:20, and a VL having an amino acid sequence having at least 95% identity to an amino acid sequence of SEQ ID NO:22.

[0259] In some embodiments, the first binding domain that binds to Vβ17 comprises: a VH comprising a VH CDR1, a VH CDR2, and a VH CDR3 having an amino acid sequence of a VH CDR1, VH CDR2, and VH CDR3, respectively, of SEQ ID NO:20. n some embodiments, the first binding domain that binds to Vβ17 comprises: a VL comprising a VL CDR1, a VL CDR2, and a VL CDR3 having an amino acid sequence of a VL CDR1, VL CDR2, and VL CDR3, respectively, of SEQ ID NO:24. In some embodiments, the first binding domain that binds to Vβ17 comprises: (i) a VH comprising a VH CDR1, a VH CDR2, and a VH CDR3 having an amino acid sequence of a VH CDR1, VH CDR2, and VH CDR3, respectively, of SEQ ID NO:20; and (ii) a VL comprising a VL CDR1, a VL CDR2, and a VL CDR3 having an amino acid sequence of a VL CDR1, VL CDR2, and VL CDR3, respectively, of SEQ ID NO:24. In some embodiments, the first binding domain that binds to Vβ17 comprises a VH having an amino acid sequence of SEQ ID NO:20. In some embodiments, the first binding domain that binds to Vβ17 comprises a VL having an amino acid sequence of SEQ ID NO:24. In some embodiments, the first binding domain that binds to Vβ17 comprises a VH having an amino acid sequence of SEQ ID NO:20, and a VL having an amino acid sequence of SEQ ID NO:24. In some embodiments, the first binding domain that binds to Vβ17 comprises a VH having an amino acid sequence having at least 95% identity to an amino acid sequence of SEQ ID NO:20. In some embodiments, the first binding domain that binds to Vβ17 comprises a VL having an amino acid sequence having at least 95% identity to an amino acid sequence of SEQ ID NO:24. In some embodiments, the first binding domain that binds to Vβ17 comprises a VH having an amino acid sequence having at least 95% identity to an amino acid sequence of SEQ ID NO:20, and a VL having an amino acid sequence having at least 95% identity to an amino acid sequence of SEQ ID NO:24.

[0260] In some embodiments, the first binding domain that binds to Vβ17 comprises: a VH comprising a VH CDR1, a VH CDR2, and a VH CDR3 having an amino acid sequence of a VH CDR1, VH CDR2, and VH CDR3, respectively, of SEQ ID NO:21. In some embodiments, the first binding domain that binds to Vβ17 comprises: a VL comprising a VL CDR1, a VL CDR2, and a VL CDR3 having an amino acid sequence of a VL CDR1, VL CDR2, and VL CDR3, respectively, of SEQ ID NO:22. In some embodiments, the first binding domain that binds to Vβ17 comprises: (i) a VH comprising a VH CDR1, a VH CDR2, and a VH CDR3 having an amino acid sequence of a VH CDR1, VH CDR2, and VH CDR3, respectively, of SEQ ID NO:21; and (ii) a VL comprising a VL CDR1, a VL CDR2, and a VL CDR3 having an amino acid sequence of a VL CDR1, VL CDR2, and VL CDR3, respectively, of SEQ ID NO:22. In some embodiments, the first binding domain that binds to Vβ17 comprises a VH having an amino acid sequence of SEQ ID NO:21. In some embodiments, the first binding domain that binds to Vβ17 comprises a VL having an amino acid sequence of SEQ ID NO:22. In some embodiments, the first binding domain that binds to Vβ17 comprises a VH having an amino acid sequence of SEQ ID NO:21, and a VL having an amino acid sequence of SEQ ID NO:22. In some embodiments, the first binding domain that binds to Vβ17 comprises a VH having an amino acid sequence having at least 95% identity to an amino acid sequence of SEQ ID NO:21. In some embodiments, the first binding domain that binds to Vβ17 comprises a VL having an amino acid sequence having at least 95% identity to an amino acid sequence of SEQ ID NO:22. In some embodiments, the first binding domain that binds to Vβ17 comprises a VH having an amino acid sequence having at least 95% identity to an amino acid sequence of SEQ ID NO:21, and a VL having an amino acid sequence having at least 95% identity to an amino acid sequence of SEQ ID NO:22.

[0261] In some embodiments, the first binding domain that binds to Vβ17 comprises: a VH comprising a VH CDR1, a VH CDR2, and a VH CDR3 having an amino acid sequence of a VH CDR1, VH CDR2, and VH CDR3, respectively, of SEQ ID NO:21. In some embodiments, the first binding domain that binds to Vβ17 comprises: a VL comprising a VL CDR1, a VL CDR2, and a VL CDR3 having an amino acid sequence of a VL CDR1, VL CDR2, and VL CDR3, respectively, of SEQ ID NO:23. In some embodiments, the first binding domain that binds to Vβ17 comprises a VH having an amino acid sequence of SEQ ID NO:21. In some embodiments, the first binding domain that binds to Vβ17 comprises: (i) a VH comprising a VH CDR1, a VH CDR2, and a VH CDR3 having an amino acid sequence of a VH CDR1, VH CDR2, and VH CDR3, respectively, of SEQ ID NO:21; and (ii) a VL comprising a VL CDR1, a VL CDR2, and a VL CDR3 having an amino acid sequence of a VL CDR1, VL CDR2, and VL CDR3, respectively, of SEQ ID NO:23. In some embodiments, the first binding domain that binds to Vβ17 comprises a VH having an amino acid sequence of SEQ ID NO:21. In some embodiments, the first binding domain that binds to Vβ17 comprises a VL having an amino acid sequence of SEQ ID NO:23. In some embodiments, the first binding domain that binds to Vβ17 comprises a VH having an amino acid sequence of SEQ ID NO:21, and a VL having an amino acid sequence of SEQ ID NO:23. In some embodiments, the first binding domain that binds to Vβ17 comprises a VH having an amino acid sequence having at least 95% identity to an amino acid sequence of SEQ ID NO:21. In some embodiments, the first binding domain that binds to Vβ17 comprises a VL having an amino acid sequence having at least 95% identity to an amino acid sequence of SEQ ID NO:23. In some embodiments, the first binding domain that binds to Vβ17 comprises a VH having an amino acid sequence having at least 95% identity to an amino acid sequence of SEQ ID NO:21, and a VL having an amino acid sequence having at least 95% identity to an amino acid sequence of SEQ ID NO:23.

[0262] In some embodiments, the first binding domain that binds to Vβ17 comprises: a VH comprising a VH CDR1, a VH CDR2, and a VH CDR3 having an amino acid sequence of a VH CDR1, VH CDR2, and VH CDR3, respectively, of SEQ ID NO:1084. In some embodiments, the first binding domain that binds to Vβ17 comprises: a VL comprising a VL CDR1, a VL CDR2, and a VL CDR3 having an amino acid sequence of a VL CDR1, VL CDR2, and VL CDR3, respectively, of SEQ ID NO:1085. In some embodiments, the first binding domain that binds to Vβ17 comprises a VH having an amino acid sequence of SEQ ID NO:1084. In some embodiments, the first binding domain that binds to Vβ17 comprises: (i) a VH comprising a VH CDR1, a VH CDR2, and a VH CDR3 having an amino acid sequence of a VH CDR1, VH CDR2, and VH CDR3, respectively, of SEQ ID NO:1084; and (ii) a VL comprising a VL CDR1, a VL CDR2, and a VL CDR3 having an amino acid sequence of a VL CDR1, VL CDR2, and VL CDR3, respectively, of SEQ ID NO:1085. In some embodiments, the first binding domain that binds to Vβ17 comprises a VH having an amino acid sequence of SEQ ID NO:1084. In some embodiments, the first binding domain that binds to Vβ17 comprises a VL having an amino acid sequence of SEQ ID NO:1085. In some embodiments, the first binding domain that binds to Vβ17 comprises a VH having an amino acid sequence of SEQ ID NO:1084, and a VL having an amino acid sequence of SEQ ID NO:1085. In some embodiments, the first binding domain that binds to Vβ17 comprises a VH having an amino acid sequence having at least 95% identity to an amino acid sequence of SEQ ID NO:1084. In some embodiments, the first binding domain that binds to Vβ17 comprises a VL having an amino acid sequence having at least 95% identity to an amino acid sequence of SEQ ID NO:1085. In some embodiments, the first binding domain that binds to Vβ17 comprises a VH having an amino acid sequence having at least 95% identity to an amino acid sequence of SEQ ID NO:1084, and a VL having an amino acid sequence having at least 95% identity to an amino acid sequence of SEQ ID NO:1085.

[0263] In some embodiments, the first binding domain that binds to Vβ17 comprises: a VH comprising a VH CDR1, a VH CDR2, and a VH CDR3 having an amino acid sequence of a VH CDR1, VH CDR2, and VH CDR3, respectively, of SEQ ID NO:46. In some embodiments, the first binding domain that binds to Vβ17 comprises: a VL comprising a VL CDR1, a VL CDR2, and a VL CDR3 having an amino acid sequence of a VL CDR1, VL CDR2, and VL CDR3, respectively, of SEQ ID NO:47. In some embodiments, the first binding domain that binds to Vβ17 comprises: (i) a VH comprising a VH CDR1, a VH CDR2, and a VH CDR3 having an amino acid sequence of a VH CDR1, VH CDR2, and VH CDR3, respectively, of SEQ ID NO:46; and (ii) a VL comprising a VL CDR1, a VL CDR2, and a VL CDR3 having an amino acid sequence of a VL CDR1, VL CDR2, and VL CDR3, respectively, of SEQ ID NO:47. In some embodiments, the first binding domain that binds to Vβ17 comprises a VH having an amino acid sequence of SEQ ID NO:46. In some embodiments, the first binding domain that binds to Vβ17 comprises a VL having an amino acid sequence of SEQ ID NO:47. In some embodiments, the first binding domain that binds to Vβ17 comprises a VH having an amino acid sequence of SEQ ID NO:46, and a VL having an amino acid sequence of SEQ ID NO:47. In some embodiments, the first binding domain that binds to Vβ17 comprises a VH having an amino acid sequence having at least 95% identity to an amino acid sequence of SEQ ID NO:46. In some embodiments, the first binding domain that binds to Vβ17 comprises a VL having an amino acid sequence having at least 95% identity to an amino acid sequence of SEQ ID NO:47. In some embodiments, the first binding domain that binds to Vβ17 comprises a VH having an amino acid sequence having at least 95% identity to an amino acid sequence of SEQ ID NO:46, and a VL having an amino acid sequence having at least 95% identity to an amino acid sequence of SEQ ID NO:47.

[0264] In some embodiments, the first binding domain that binds to Vβ17 comprises: a VH comprising a VH CDR1, a VH CDR2, and a VH CDR3 having an amino acid sequence of a VH CDR1, VH CDR2, and VH CDR3, respectively, of SEQ ID NO:77. In some embodiments, the first binding domain that binds to Vβ17 comprises: a VL comprising a VL CDR1, a VL CDR2, and a VL CDR3 having an amino acid sequence of a VL CDR1, VL CDR2, and VL CDR3, respectively, of SEQ ID NO:78. In some embodiments, the first binding domain that binds to Vβ17 comprises: (i) a VH comprising a VH CDR1, a VH CDR2, and a VH CDR3 having an amino acid sequence of a VH CDR1, VH CDR2, and VH CDR3, respectively, of SEQ ID NO:77; and (ii) a VL comprising a VL CDR1, a VL CDR2, and a VL CDR3 having an amino acid sequence of a VL CDR1, VL CDR2, and VL CDR3, respectively, of SEQ ID NO:78. In some embodiments, the first binding domain that binds to Vβ17 comprises a VH having an amino acid sequence of SEQ ID NO:77. In some embodiments, the first binding domain that binds to Vβ17 comprises a VL having an amino acid sequence of SEQ ID NO:78. In some embodiments, the first binding domain that binds to Vβ17 comprises a VH having an amino acid sequence of SEQ ID NO:77, and a VL having an amino acid sequence of SEQ ID NO:78. In some embodiments, the first binding domain that binds to Vβ17 comprises a VH having an amino acid sequence having at least 95% identity to an amino acid sequence of SEQ ID NO:77. In some embodiments, the first binding domain that binds to Vβ17 comprises a VL having an amino acid sequence having at least 95% identity to an amino acid sequence of SEQ ID NO:78. In some embodiments, the first binding domain that binds to Vβ17 comprises a VH having an amino acid sequence having at least 95% identity to an amino acid sequence of SEQ ID NO:77, and a VL having an amino acid sequence having at least 95% identity to an amino acid sequence of SEQ ID NO:78.

[0265] In some embodiments, the first binding domain that binds to Vβ17 comprises: a VH comprising a VH CDR1, a VH CDR2, and a VH CDR3 having an amino acid sequence of a VH CDR1, VH CDR2, and VH CDR3, respectively, of SEQ ID NO:79. In some embodiments, the first binding domain that binds to Vβ17 comprises: a VL comprising a VL CDR1, a VL CDR2, and a VL CDR3 having an amino acid sequence of a VL CDR1, VL CDR2, and VL CDR3, respectively, of SEQ ID NO:80. In some embodiments, the first binding domain that binds to Vβ17 comprises: (i) a VH comprising a VH CDR1, a VH CDR2, and a VH CDR3 having an amino acid sequence of a VH CDR1, VH CDR2, and VH CDR3, respectively, of SEQ ID NO:79; and (ii) a VL comprising a VL CDR1, a VL CDR2, and a VL CDR3 having an amino acid sequence of a VL CDR1, VL CDR2, and VL CDR3, respectively, of SEQ ID NO:80. In some embodiments, the first binding domain that binds to Vβ17 comprises a VH having an amino acid sequence of SEQ ID NO:79. In some embodiments, the first binding domain that binds to Vβ17 comprises a VL having an amino acid sequence of SEQ ID NO:80. In some embodiments, the first binding domain that binds to Vβ17 comprises a VH having an amino acid sequence of SEQ ID NO:79, and a VL having an amino acid sequence of SEQ ID NO:80. In some embodiments, the first binding domain that binds to Vβ17 comprises a VH having an amino acid sequence having at least 95% identity to an amino acid sequence of SEQ ID NO:79. In some embodiments, the first binding domain that binds to Vβ17 comprises a VL having an amino acid sequence having at least 95% identity to an amino acid sequence of SEQ ID NO:80. In some embodiments, the first binding domain that binds to Vβ17 comprises a VH having an amino acid sequence having at least 95% identity to an amino acid sequence of SEQ ID NO:79, and a VL having an amino acid sequence having at least 95% identity to an amino acid sequence of SEQ ID NO:80.

[0266] In some embodiments, the first binding domain that binds to Vβ17 comprises: a VH comprising a VH CDR1, a VH CDR2, and a VH CDR3 having an amino acid sequence of a VH CDR1, VH CDR2, and VH CDR3, respectively, of SEQ ID NO:81. In some embodiments, the first binding domain that binds to Vβ17 comprises: a VL comprising a VL CDR1, a VL CDR2, and a VL CDR3 having an amino acid sequence of a VL CDR1, VL CDR2, and VL CDR3, respectively, of SEQ ID NO:82. In some embodiments, the first binding domain that binds to Vβ17 comprises: (i) a VH comprising a VH CDR1, a VH CDR2, and a VH CDR3 having an amino acid sequence of a VH CDR1, VH CDR2, and VH CDR3, respectively, of SEQ ID NO:81; and (ii) a VL comprising a VL CDR1, a VL CDR2, and a VL CDR3 having an amino acid sequence of a VL CDR1, VL CDR2, and VL CDR3, respectively, of SEQ ID NO:82. In some embodiments, the first binding domain that binds to Vβ17 comprises a VH having an amino acid sequence of SEQ ID NO:81. In some embodiments, the first binding domain that binds to Vβ17 comprises a VL having an amino acid sequence of SEQ ID NO:82. In some embodiments, the first binding domain that binds to Vβ17 comprises a VH having an amino acid sequence of SEQ ID NO:81, and a VL having an amino acid sequence of SEQ ID NO:82. In some embodiments, the first binding domain that binds to Vβ17 comprises a VH having an amino acid sequence having at least 95% identity to an amino acid sequence of SEQ ID NO:81. In some embodiments, the first binding domain that binds to Vβ17 comprises a VL having an amino acid sequence having at least 95% identity to an amino acid sequence of SEQ ID NO:82. In some embodiments, the first binding domain that binds to Vβ17 comprises a VH having an amino acid sequence having at least 95% identity to an amino acid sequence of SEQ ID NO:81, and a VL having an amino acid sequence having at least 95% identity to an amino acid sequence of SEQ ID NO:82.

[0267] In some embodiments, the first binding domain that binds to Vβ17 comprises: a VH comprising a VH CDR1, a VH CDR2, and a VH CDR3 having an amino acid sequence of a VH CDR1, VH CDR2, and VH CDR3, respectively, of SEQ ID NO:83. In some embodiments, the first binding domain that binds to Vβ17 comprises: a VL comprising a VL CDR1, a VL CDR2, and a VL CDR3 having an amino acid sequence of a VL CDR1, VL CDR2, and VL CDR3, respectively, of SEQ ID NO:84. In some embodiments, the first binding domain that binds to Vβ17 comprises: (i) a VH comprising a VH CDR1, a VH CDR2, and a VH CDR3 having an amino acid sequence of a VH CDR1, VH CDR2, and VH CDR3, respectively, of SEQ ID NO:83; and (ii) a VL comprising a VL CDR1, a VL CDR2, and a VL CDR3 having an amino acid sequence of a VL CDR1, VL CDR2, and VL CDR3, respectively, of SEQ ID NO:84. In some embodiments, the first binding domain that binds to Vβ17 comprises a VH having an amino acid sequence of SEQ ID NO:83. In some embodiments, the first binding domain that binds to Vβ17 comprises a VL having an amino acid sequence of SEQ ID NO:84. In some embodiments, the first binding domain that binds to Vβ17 comprises a VH having an amino acid sequence of SEQ ID NO:83, and a VL having an amino acid sequence of SEQ ID NO:84. In some embodiments, the first binding domain that binds to Vβ17 comprises a VH having an amino acid sequence having at least 95% identity to an amino acid sequence of SEQ ID NO:83. In some embodiments, the first binding domain that binds to Vβ17 comprises a VL having an amino acid sequence having at least 95% identity to an amino acid sequence of SEQ ID NO:84. In some embodiments, the first binding domain that binds to Vβ17 comprises a VH having an amino acid sequence having at least 95% identity to an amino acid sequence of SEQ ID NO:83, and a VL having an amino acid sequence having at least 95% identity to an amino acid sequence of SEQ ID NO:84.

[0268] In some embodiments, the first binding domain that binds to Vβ17 comprises: a VH comprising a VH CDR1, a VH CDR2, and a VH CDR3 having an amino acid sequence of a VH CDR1, VH CDR2, and VH CDR3, respectively, of SEQ ID NO:85. In some embodiments, the first binding domain that binds to Vβ17 comprises: a VL comprising a VL CDR1, a VL CDR2, and a VL CDR3 having an amino acid sequence of a VL CDR1, VL CDR2, and VL CDR3, respectively, of SEQ ID NO:86. In some embodiments, the first binding domain that binds to Vβ17 comprises: (i) a VH comprising a VH CDR1, a VH CDR2, and a VH CDR3 having an amino acid sequence of a VH CDR1, VH CDR2, and VH CDR3, respectively, of SEQ ID NO:85; and (ii) a VL comprising a VL CDR1, a VL CDR2, and a VL CDR3 having an amino acid sequence of a VL CDR1, VL CDR2, and VL CDR3, respectively, of SEQ ID NO:86. In some embodiments, the first binding domain that binds to Vβ17 comprises a VH having an amino acid sequence of SEQ ID NO:85. In some embodiments, the first binding domain that binds to Vβ17 comprises a VL having an amino acid sequence of SEQ ID NO:86. In some embodiments, the first binding domain that binds to Vβ17 comprises a VH having an amino acid sequence of SEQ ID NO:85, and a VL having an amino acid sequence of SEQ ID NO:86. In some embodiments, the first binding domain that binds to Vβ17 comprises a VH having an amino acid sequence having at least 95% identity to an amino acid sequence of SEQ ID NO:85. In some embodiments, the first binding domain that binds to Vβ17 comprises a VL having an amino acid sequence having at least 95% identity to an amino acid sequence of SEQ ID NO:86. In some embodiments, the first binding domain that binds to Vβ17 comprises a VH having an amino acid sequence having at least 95% identity to an amino acid sequence of SEQ ID NO:85, and a VL having an amino acid sequence having at least 95% identity to an amino acid sequence of SEQ ID NO:86.

[0269] In some embodiments, the first binding domain that binds to Vβ17 comprises: a VH comprising a VH CDR1, a VH CDR2, and a VH CDR3 having an amino acid sequence of a VH CDR1, VH CDR2, and VH CDR3, respectively, of SEQ ID NO:87. In some embodiments, the first binding domain that binds to Vβ17 comprises: a VL comprising a VL CDR1, a VL CDR2, and a VL CDR3 having an amino acid sequence of a VL CDR1, VL CDR2, and VL CDR3, respectively, of SEQ ID NO:88. In some embodiments, the first binding domain that binds to Vβ17 comprises: (i) a VH comprising a VH CDR1, a VH CDR2, and a VH CDR3 having an amino acid sequence of a VH CDR1, VH CDR2, and VH CDR3, respectively, of SEQ ID NO:87; and (ii) a VL comprising a VL CDR1, a VL CDR2, and a VL CDR3 having an amino acid sequence of a VL CDR1, VL CDR2, and VL CDR3, respectively, of SEQ ID NO:88. In some embodiments, the first binding domain that binds to Vβ17 comprises a VH having an amino acid sequence of SEQ ID NO:87. In some embodiments, the first binding domain that binds to Vβ17 comprises a VL having an amino acid sequence of SEQ ID NO:88. In some embodiments, the first binding domain that binds to Vβ17 comprises a VH having an amino acid sequence of SEQ ID NO:87, and a VL having an amino acid sequence of SEQ ID NO:88. In some embodiments, the first binding domain that binds to Vβ17 comprises a VH having an amino acid sequence having at least 95% identity to an amino acid sequence of SEQ ID NO:87. In some embodiments, the first binding domain that binds to Vβ17 comprises a VL having an amino acid sequence having at least 95% identity to an amino acid sequence of SEQ ID NO:88. In some embodiments, the first binding domain that binds to Vβ17 comprises a VH having an amino acid sequence having at least 95% identity to an amino acid sequence of SEQ ID NO:87, and a VL having an amino acid sequence having at least 95% identity to an amino acid sequence of SEQ ID NO:88.

[0270] In some embodiments, the first binding domain that binds to Vβ17 comprises: a VH comprising a VH CDR1, a VH CDR2, and a VH CDR3 having an amino acid sequence of a VH CDR1, VH CDR2, and VH CDR3, respectively, of SEQ ID NO:21. In some embodiments, the first binding domain that binds to Vβ17 comprises: a VL comprising a VL CDR1, a VL CDR2, and a VL CDR3 having an amino acid sequence of a VL CDR1, VL CDR2, and VL CDR3, respectively, of SEQ ID NO:665. In some embodiments, the first binding domain that binds to Vβ17 comprises: (i) a VH comprising a VH CDR1, a VH CDR2, and a VH CDR3 having an amino acid sequence of a VH CDR1, VH CDR2, and VH CDR3, respectively, of SEQ ID NO:21; and (ii) a VL comprising a VL CDR1, a VL CDR2, and a VL CDR3 having an amino acid sequence of a VL CDR1, VL CDR2, and VL CDR3, respectively, of SEQ ID NO:665. In some embodiments, the first binding domain that binds to Vβ17 comprises a VH having an amino acid sequence of SEQ ID NO:21. In some embodiments, the first binding domain that binds to Vβ17 comprises a VL having an amino acid sequence of SEQ ID NO:665. In some embodiments, the first binding domain that binds to Vβ17 comprises a VH having an amino acid sequence of SEQ ID NO:21, and a VL having an amino acid sequence of SEQ ID NO:665. In some embodiments, the first binding domain that binds to Vβ17 comprises a VH having an amino acid sequence having at least 95% identity to an amino acid sequence of SEQ ID NO:21. In some embodiments, the first binding domain that binds to Vβ17 comprises a VL having an amino acid sequence having at least 95% identity to an amino acid sequence of SEQ ID NO:665. In some embodiments, the first binding domain that binds to Vβ17 comprises a VH having an amino acid sequence having at least 95% identity to an amino acid sequence of SEQ ID NO:21, and a VL having an amino acid sequence having at least 95% identity to an amino acid sequence of SEQ ID NO:665.

[0271] In some embodiments, the first binding domain that binds to Vβ17 comprises: a VH comprising a VH CDR1, a VH CDR2, and a VH CDR3 having an amino acid sequence of a VH CDR1, VH CDR2, and VH CDR3, respectively, of SEQ ID NO:1084. In some embodiments, the first binding domain that binds to Vβ17 comprises: a VL comprising a VL CDR1, a VL CDR2, and a VL CDR3 having an amino acid sequence of a VL CDR1, VL CDR2, and VL CDR3, respectively, of SEQ ID NO:1085. In some embodiments, the first binding domain that binds to Vβ17 comprises: (i) a VH comprising a VH CDR1, a VH CDR2, and a VH CDR3 having an amino acid sequence of a VH CDR1, VH CDR2, and VH CDR3, respectively, of SEQ ID NO:1084; and (ii) a VL comprising a VL CDR1, a VL CDR2, and a VL CDR3 having an amino acid sequence of a VL CDR1, VL CDR2, and VL CDR3, respectively, of SEQ ID NO:1085. In some embodiments, the first binding domain that binds to Vβ17 comprises a VH having an amino acid sequence of SEQ ID NO:1084. In some embodiments, the first binding domain that binds to Vβ17 comprises a VL having an amino acid sequence of SEQ ID NO:1085. In some embodiments, the first binding domain that binds to Vβ17 comprises a VH having an amino acid sequence of SEQ ID NO:1084, and a VL having an amino acid sequence of SEQ ID NO:1085. In some embodiments, the first binding domain that binds to Vβ17 comprises a VH having an amino acid sequence having at least 95% identity to an amino acid sequence of SEQ ID NO:1084. In some embodiments, the first binding domain that binds to Vβ17 comprises a VL having an amino acid sequence having at least 95% identity to an amino acid sequence of SEQ ID NO:1085. In some embodiments, the first binding domain that binds to Vβ17 comprises a VH having an amino acid sequence having at least 95% identity to an amino acid sequence of SEQ ID NO:1084, and a VL having an amino acid sequence having at least 95% identity to an amino acid sequence of SEQ ID NO:1085.

[0272] In some embodiments, the second target is a cancer antigen. Exemplary cancer antigens are provided infra.

[0273] In some embodiments, the second target is a tumor-specific antigen.

[0274] In some embodiments, the second target is a tumor associated antigen (TAA).

[0275] In some embodiments, the second target is a neoantigen.

[0276] In some embodiments, the second target is BCMA. Thus, in some embodiments, provided is a trispecific antibody comprising: (a) a first binding domain that binds to Vβ17, (b) a second binding domain that binds to BCMA, and (c) a third binding domain that binds to CD28. In some embodiments, the first binding domain that binds to Vβ17 comprises a VH CDR1, VH CDR2, and VH CDR3 of a Vβ17 antibody provided herein. In some embodiments, the first binding domain that binds to Vβ17 comprises a VL CDR1, VL CDR2, and VL CDR3 amino acid sequence of a Vβ17 antibody provided herein. In some embodiments, the first binding domain that binds to Vβ17 comprises a VH CDR1, VH CDR2, VH CDR3, VL CDR1, VL CDR2, and VL CDR3 amino acid sequence of a Vβ17 antibody provided herein. In some embodiments, the second binding domain that binds to BCMA comprises a VH CDR1, VH CDR2, and VH CDR3 amino acid sequence of a BCMA antibody provided herein. In some embodiments, the second binding domain that binds to BCMA comprises a VL CDR1, VL CDR2, and VL CDR3 amino acid sequence of a BCMA antibody provided herein. In some embodiments, the second binding domain that binds to BCMA comprises a VH CDR1, VH CDR2, VH CDR3, VL CDR1, VL CDR2, and VL CDR3 amino acid sequence of a BCMA antibody provided herein. In some embodiments, the third binding domain that binds to CD28 comprises a VH CDR1, VH CDR2, and VH CDR3 amino acid sequence of a CD28 antibody provided herein. In some embodiments, the third binding domain that binds to CD28 comprises a VL CDR1, VL CDR2, and VL CDR3 amino acid sequence of a CD28 antibody provided herein. In some embodiments, the third binding domain that binds to CD28 comprises a VH CDR1, VH CDR2, VH CDR3, VL CDR1, VL CDR2, and VL CDR3 amino acid sequence of a CD28 antibody provided herein.

[0277] In some embodiments, the second binding domain that binds to BCMA comprises: a VH comprising a VH CDR1, a VH CDR2, and a VH CDR3 having an amino acid sequence of a VH CDR1, VH CDR2, and VH CDR3, respectively, of SEQ ID NO:95. In some embodiments, the second binding domain that binds to BCMA comprises: a VL comprising a VL CDR1, a VL CDR2, and a VL CDR3 having an amino acid sequence of a VL CDR1, VL CDR2, and VL CDR3, respectively, of SEQ ID NO:96. In some embodiments, the second binding domain that binds to BCMA comprises: (i) a VH comprising a VH CDR1, a VH CDR2, and a VH CDR3 having an amino acid sequence of a VH CDR1, VH CDR2, and VH CDR3, respectively, of SEQ ID NO:95; and (ii) a VL comprising a VL CDR1, a VL CDR2, and a VL CDR3 having an amino acid sequence of a VL CDR1, VL CDR2, and VL CDR3, respectively, of SEQ ID NO:96. In some embodiments, the second binding domain that binds to BCMA comprises: (i) a VH comprising a VH CDR1 having an amino acid sequence of SEQ ID NO:89, a VH CDR2 having an amino acid sequence of SEQ ID NO:90, and a VH CDR3 having an amino acid sequence of SEQ ID NO:91; and (ii) a VL comprising a VL CDR1 having an amino acid sequence of SEQ ID NO:93, a VL CDR2 having an amino acid sequence of SEQ ID NO:94, and a VL CDR3 having an amino acid sequence of SEQ ID NO:94. In some embodiments, the second binding domain that binds to BCMA comprises: (i) a VH comprising a VH CDR1 having an amino acid sequence of SEQ ID NO:622, a VH CDR2 having an amino acid sequence of SEQ ID NO:623, and a VH CDR3 having an amino acid sequence of SEQ ID NO:624; and (ii) a VL comprising a VL CDR1 having an amino acid sequence of SEQ ID NO:625, a VL CDR2 having an amino acid sequence of SEQ ID NO:626, and a VL CDR3 having an amino acid sequence of SEQ ID NO:627. In some embodiments, the second binding domain that binds to BCMA comprises: (i) a VH comprising a VH CDR1 having an amino acid sequence of SEQ ID NO:628, a VH CDR2 having an amino acid sequence of SEQ ID NO:629, and a VH CDR3 having an amino acid sequence of SEQ ID NO:630; and (ii) a VL comprising a VL CDR1 having an amino acid sequence of SEQ ID NO:631, a VL CDR2 having an amino acid sequence of SEQ ID NO:632, and a VL CDR3 having an amino acid sequence of SEQ ID NO:633. In some embodiments, the second binding domain that binds to BCMA comprises: (i) a VH comprising a VH CDR1 having an amino acid sequence of SEQ ID NO:634, a VH CDR2 having an amino acid sequence of SEQ ID NO:635, and a VH CDR3 having an amino acid sequence of SEQ ID NO:636; and (ii) a VL comprising a VL CDR1 having an amino acid sequence of SEQ ID NO:637, a VL CDR2 having an amino acid sequence of SEQ ID NO:638, and a VL CDR3 having an amino acid sequence of SEQ ID NO:639. In some embodiments, the second binding domain that binds to BCMA comprises: (i) a VH comprising a VH CDR1 having an amino acid sequence of SEQ ID NO:640, a VH CDR2 having an amino acid sequence of SEQ ID NO:641, and a VH CDR3 having an amino acid sequence of SEQ ID NO:642; and (ii) a VL comprising a VL CDR1 having an amino acid sequence of SEQ ID NO:643, a VL CDR2 having an amino acid sequence of SEQ ID NO:644, and a VL CDR3 having an amino acid sequence of SEQ ID NO:645. In some embodiments, the second binding domain that binds to BCMA comprises: (i) a VH comprising a VH CDR1 having an amino acid sequence of SEQ ID NO:646, a VH CDR2 having an amino acid sequence of SEQ ID NO:647, and a VH CDR3 having an amino acid sequence of SEQ ID NO:648; and (ii) a VL comprising a VL CDR1 having an amino acid sequence of SEQ ID NO:649, a VL CDR2 having an amino acid sequence of SEQ ID NO:650, and a VL CDR3 having an amino acid sequence of SEQ ID NO:651. In some embodiments, the second binding domain that binds to BCMA comprises: (i) a VH comprising a VH CDR1 having an amino acid sequence of SEQ ID NO:652, a VH CDR2 having an amino acid sequence of SEQ ID NO:653, and a VH CDR3 having an amino acid sequence of SEQ ID NO:654; and (ii) a VL comprising a VL CDR1 having an amino acid sequence of SEQ ID NO:655, a VL CDR2 having an amino acid sequence of SEQ ID NO:656, and a VL CDR3 having an amino acid sequence of SEQ ID NO:657. In some embodiments, the second binding domain that binds to BCMA comprises: (i) a VH comprising a VH CDR1 having an amino acid sequence of SEQ ID NO:658, a VH CDR2 having an amino acid sequence of SEQ ID NO:659, and a VH CDR3 having an amino acid sequence of SEQ ID NO:660; and (ii) a VL comprising a VL CDR1 having an amino acid sequence of SEQ ID NO:661, a VL CDR2 having an amino acid sequence of SEQ ID NO:662, and a VL CDR3 having an amino acid sequence of SEQ ID NO:663. In some embodiments, the second binding domain that binds to BCMA comprises a VH having an amino acid sequence of SEQ ID NO:95. In some embodiments, the second binding domain that binds to BCMA comprises a VL having an amino acid sequence of SEQ ID NO:96. In some embodiments, the second binding domain that binds to BCMA comprises a VH having an amino acid sequence of SEQ ID NO:95, and a VL having an amino acid sequence of SEQ ID NO:96. In some embodiments, the second binding domain that binds to BCMA comprises a VH having an amino acid sequence having at least 95% identity to an amino acid sequence of SEQ ID NO:95. In some embodiments, the second binding domain that binds to BCMA comprises a VL having an amino acid sequence having at least 95% identity to an amino acid sequence of SEQ ID NO:96. In some embodiments, the second binding domain that binds to BCMA comprises a VH having an amino acid sequence having at least 95% identity to an amino acid sequence of SEQ ID NO:95, and a VL having an amino acid sequence having at least 95% identity to an amino acid sequence of SEQ ID NO:96. In some embodiments, the second binding domain that binds to BCMA comprises a VH having an amino acid sequence of SEQ ID NO:1052. In some embodiments, the second binding domain that binds to BCMA comprises a VL having an amino acid sequence of SEQ ID NO:1053. In some embodiments, the second binding domain that binds to BCMA comprises a VH having an amino acid sequence of SEQ ID NO:1052, and a VL having an amino acid sequence of SEQ ID NO:1053. In some embodiments, the second binding domain that binds to BCMA comprises a VH having an amino acid sequence having at least 95% identity to an amino acid sequence of SEQ ID NO:1052. In some embodiments, the second binding domain that binds to BCMA comprises a VL having an amino acid sequence having at least 95% identity to an amino acid sequence of SEQ ID NO:1053. In some embodiments, the second binding domain that binds to BCMA comprises a VH having an amino acid sequence having at least 95% identity to an amino acid sequence of SEQ ID NO:1052, and a VL having an amino acid sequence having at least 95% identity to an amino acid sequence of SEQ ID NO:1053.

[0278] In some embodiments, the second target is PSMA. Thus, in some embodiments, provided is a trispecific antibody comprising: (a) a first binding domain that binds to Vβ17, (b) a second binding domain that binds to PSMA, and (c) a third binding domain that binds to CD28. In some embodiments, the first binding domain that binds to Vβ17 comprises a VH CDR1, VH CDR2, and VH CDR3 of a Vβ17 antibody provided herein. In some embodiments, the first binding domain that binds to Vβ17 comprises a VL CDR1, VL CDR2, and VL CDR3 of a Vβ17 antibody provided herein. In some embodiments, the first binding domain that binds to Vβ17 comprises a VH CDR1, VH CDR2, VH CDR3, VL CDR1, VL CDR2, and VL CDR3 of a Vβ17 antibody provided herein. In some embodiments, the second binding domain that binds to PSMA comprises a VH CDR1, VH CDR2, and VH CDR3 of a PSMA antibody provided herein. In some embodiments, the second binding domain that binds to PSMA comprises a VL CDR1, VL CDR2, and VL CDR3 of a PSMA antibody provided herein. In some embodiments, the second binding domain that binds to PSMA comprises a VH CDR1, VH CDR2, VH CDR3, VL CDR1, VL CDR2, and VL CDR3 of a PSMA antibody provided herein. In some embodiments, the third binding domain that binds to CD28 comprises a VH CDR1, VH CDR2, and VH CDR3 of a CD28 antibody provided herein. In some embodiments, the third binding domain that binds to CD28 comprises a VL CDR1, VL CDR2, and VL CDR3 of a CD28 antibody provided herein. In some embodiments, the third binding domain that binds to CD28 comprises a VH CDR1, VH CDR2, VH CDR3, VL CDR1, VL CDR2, and VL CDR3 of a CD28 antibody provided herein.

[0279] In some embodiments, the second binding domain that binds to PSMA comprises: a VH comprising a VH CDR1, a VH CDR2, and a VH CDR3 having an amino acid sequence of a VH CDR1, VH CDR2, and VH CDR3, respectively, of SEQ ID NO:1046. In some embodiments, the second binding domain that binds to PSMA comprises: a VL comprising a VL CDR1, a VL CDR2, and a VL CDR3 having an amino acid sequence of a VL CDR1, VL CDR2, and VL CDR3, respectively, of SEQ ID NO:1047. In some embodiments, the second binding domain that binds to PSMA comprises: (i) a VH comprising a VH CDR1, a VH CDR2, and a VH CDR3 having an amino acid sequence of a VH CDR1, VH CDR2, and VH CDR3, respectively, of SEQ ID NO:1046; and (ii) a VL comprising a VL CDR1, a VL CDR2, and a VL CDR3 having an amino acid sequence of a VL CDR1, VL CDR2, and VL CDR3, respectively, of SEQ ID NO:1047. In some embodiments, the second binding domain that binds to PSMA comprises a VH having an amino acid sequence of SEQ ID NO:1046. In some embodiments, the second binding domain that binds to PSMA comprises a VL having an amino acid sequence of SEQ ID NO:1047. In some embodiments, the second binding domain that binds to PSMA comprises a VH having an amino acid sequence of SEQ ID NO:1046, and a VL having an amino acid sequence of SEQ ID NO:1047. In some embodiments, the second binding domain that binds to PSMA comprises a VH having an amino acid sequence having at least 95% identity to an amino acid sequence of SEQ ID NO:1046. In some embodiments, the second binding domain that binds to PSMA comprises a VL having an amino acid sequence having at least 95% identity to an amino acid sequence of SEQ ID NO:1047. In some embodiments, the second binding domain that binds to PSMA comprises a VH having an amino acid sequence having at least 95% identity to an amino acid sequence of SEQ ID NO:1046, and a VL having an amino acid sequence having at least 95% identity to an amino acid sequence of SEQ ID NO:1047. In some embodiments, the second binding domain that binds to PSMA comprises: (i) a VH comprising a VH CDR1 having an amino acid sequence of SEQ ID NO:1019, a VH CDR2 having an amino acid sequence of SEQ ID NO:1020, and a VH CDR3 having an amino acid sequence of SEQ ID NO:1021; and (ii) a VL comprising a VL CDR1 having an amino acid sequence of SEQ ID NO:1034, a VL CDR2 having an amino acid sequence of SEQ ID NO:1035, and a VL CDR3 having an amino acid sequence of SEQ ID NO:1036. In some embodiments, the second binding domain that binds to PSMA comprises: (i) a VH comprising a VH CDR1 having an amino acid sequence of SEQ ID NO:1022, a VH CDR2 having an amino acid sequence of SEQ ID NO:1023, and a VH CDR3 having an amino acid sequence of SEQ ID NO:1024; and (ii) a VL comprising a VL CDR1 having an amino acid sequence of SEQ ID NO:1037, a VL CDR2 having an amino acid sequence of SEQ ID NO:1038, and a VL CDR3 having an amino acid sequence of SEQ ID NO:1039. In some embodiments, the second binding domain that binds to PSMA comprises: (i) a VH comprising a VH CDR1 having an amino acid sequence of SEQ ID NO:1016, a VH CDR2 having an amino acid sequence of SEQ ID NO:1017, and a VH CDR3 having an amino acid sequence of SEQ ID NO:1018; and (ii) a VL comprising a VL CDR1 having an amino acid sequence of SEQ ID NO:1031, a VL CDR2 having an amino acid sequence of SEQ ID NO:1032, and a VL CDR3 having an amino acid sequence of SEQ ID NO:1033. In some embodiments, the second binding domain that binds to PSMA comprises: (i) a VH comprising a VH CDR1 having an amino acid sequence of SEQ ID NO:1028, a VH CDR2 having an amino acid sequence of SEQ ID NO:1029, and a VH CDR3 having an amino acid sequence of SEQ ID NO:1030; and (ii) a VL comprising a VL CDR1 having an amino acid sequence of SEQ ID NO:1043, a VL CDR2 having an amino acid sequence of SEQ ID NO:1044, and a VL CDR3 having an amino acid sequence of SEQ ID NO:1045. In some embodiments, the second binding domain that binds to PSMA comprises: (i) a VH comprising a VH CDR1 having an amino acid sequence of SEQ ID NO:1025, a VH CDR2 having an amino acid sequence of SEQ ID NO:1026, and a VH CDR3 having an amino acid sequence of SEQ ID NO:1027; and (ii) a VL comprising a VL CDR1 having an amino acid sequence of SEQ ID NO:1040, a VL CDR2 having an amino acid sequence of SEQ ID NO:1041, and a VL CDR3 having an amino acid sequence of SEQ ID NO:1042.

[0280] In some embodiments, the third binding domain that binds to CD28 comprises: a VH comprising a VH CDR1, a VH CDR2, and a VH CDR3 having an amino acid sequence of a VH CDR1, VH CDR2, and VH CDR3, respectively, of SEQ ID NO:690. In some embodiments, the third binding domain that binds to CD28 comprises: a VL comprising a VL CDR1, a VL CDR2, and a VL CDR3 having an amino acid sequence of a VL CDR1, VL CDR2, and VL CDR3, respectively, of SEQ ID NO:696. In some embodiments, the third binding domain that binds to CD28 comprises: (i) a VH comprising a VH CDR1, a VH CDR2, and a VH CDR3 having an amino acid sequence of a VH CDR1, VH CDR2, and VH CDR3, respectively, of SEQ ID NO:690; and (ii) a VL comprising a VL CDR1, a VL CDR2, and a VL CDR3 having an amino acid sequence of a VL CDR1, VL CDR2, and VL CDR3, respectively, of SEQ ID NO:696. In some embodiments, the third binding domain that binds to CD28 comprises a VH having an amino acid sequence of SEQ ID NO:690. In some embodiments, the third binding domain that binds to CD28 comprises a VL having an amino acid sequence of SEQ ID NO:696. In some embodiments, the third binding domain that binds to CD28 comprises a VH having an amino acid sequence of SEQ ID NO:690, and a VL having an amino acid sequence of SEQ ID NO:696. In some embodiments, the third binding domain that binds to CD28 comprises a VH having an amino acid sequence having at least 95% identity to an amino acid sequence of SEQ ID NO:690. In some embodiments, the third binding domain that binds to CD28 comprises a VL having an amino acid sequence having at least 95% identity to an amino acid sequence of SEQ ID NO:696. In some embodiments, the third binding domain that binds to CD28 comprises a VH having an amino acid sequence having at least 95% identity to an amino acid sequence of SEQ ID NO:690, and a VL having an amino acid sequence having at least 95% identity to an amino acid sequence of SEQ ID NO:696.

[0281] In some embodiments, the third binding domain that binds to CD28 comprises: a VH comprising a VH CDR1, a VH CDR2, and a VH CDR3 having an amino acid sequence of a VH CDR1, VH CDR2, and VH CDR3, respectively, of SEQ ID NO:691. In some embodiments, the third binding domain that binds to CD28 comprises: a VL comprising a VL CDR1, a VL CDR2, and a VL CDR3 having an amino acid sequence of a VL CDR1, VL CDR2, and VL CDR3, respectively, of SEQ ID NO:697. In some embodiments, the third binding domain that binds to CD28 comprises: (i) a VH comprising a VH CDR1, a VH CDR2, and a VH CDR3 having an amino acid sequence of a VH CDR1, VH CDR2, and VH CDR3, respectively, of SEQ ID NO:691; and (ii) a VL comprising a VL CDR1, a VL CDR2, and a VL CDR3 having an amino acid sequence of a VL CDR1, VL CDR2, and VL CDR3, respectively, of SEQ ID NO:697. In some embodiments, the third binding domain that binds to CD28 comprises a VH having an amino acid sequence of SEQ ID NO:691. In some embodiments, the third binding domain that binds to CD28 comprises a VL having an amino acid sequence of SEQ ID NO:697. In some embodiments, the third binding domain that binds to CD28 comprises a VH having an amino acid sequence of SEQ ID NO:691, and a VL having an amino acid sequence of SEQ ID NO:697. In some embodiments, the third binding domain that binds to CD28 comprises a VH having an amino acid sequence having at least 95% identity to an amino acid sequence of SEQ ID NO:691. In some embodiments, the third binding domain that binds to CD28 comprises a VL having an amino acid sequence having at least 95% identity to an amino acid sequence of SEQ ID NO:697. In some embodiments, the third binding domain that binds to CD28 comprises a VH having an amino acid sequence having at least 95% identity to an amino acid sequence of SEQ ID NO:691, and a VL having an amino acid sequence having at least 95% identity to an amino acid sequence of SEQ ID NO:697.

[0282] In some embodiments, the third binding domain that binds to CD28 comprises: a VH comprising a VH CDR1, a VH CDR2, and a VH CDR3 having an amino acid sequence of a VH CDR1, VH CDR2, and VH CDR3, respectively, of SEQ ID NO:692. In some embodiments, the third binding domain that binds to CD28 comprises: a VL comprising a VL CDR1, a VL CDR2, and a VL CDR3 having an amino acid sequence of a VL CDR1, VL CDR2, and VL CDR3, respectively, of SEQ ID NO:698. In some embodiments, the third binding domain that binds to CD28 comprises: (i) a VH comprising a VH CDR1, a VH CDR2, and a VH CDR3 having an amino acid sequence of a VH CDR1, VH CDR2, and VH CDR3, respectively, of SEQ ID NO:692; and (ii) a VL comprising a VL CDR1, a VL CDR2, and a VL CDR3 having an amino acid sequence of a VL CDR1, VL CDR2, and VL CDR3, respectively, of SEQ ID NO:698. In some embodiments, the third binding domain that binds to CD28 comprises a VH having an amino acid sequence of SEQ ID NO:692. In some embodiments, the third binding domain that binds to CD28 comprises a VL having an amino acid sequence of SEQ ID NO:698. In some embodiments, the third binding domain that binds to CD28 comprises a VH having an amino acid sequence of SEQ ID NO:692, and a VL having an amino acid sequence of SEQ ID NO:698. In some embodiments, the third binding domain that binds to CD28 comprises a VH having an amino acid sequence having at least 95% identity to an amino acid sequence of SEQ ID NO:692. In some embodiments, the third binding domain that binds to CD28 comprises a VL having an amino acid sequence having at least 95% identity to an amino acid sequence of SEQ ID NO:698. In some embodiments, the third binding domain that binds to CD28 comprises a VH having an amino acid sequence having at least 95% identity to an amino acid sequence of SEQ ID NO:692, and a VL having an amino acid sequence having at least 95% identity to an amino acid sequence of SEQ ID NO:698.

[0283] In some embodiments, the third binding domain that binds to CD28 comprises: a VH comprising a VH CDR1, a VH CDR2, and a VH CDR3 having an amino acid sequence of a VH CDR1, VH CDR2, and VH CDR3, respectively, of SEQ ID NO:693. In some embodiments, the third binding domain that binds to CD28 comprises: a VL comprising a VL CDR1, a VL CDR2, and a VL CDR3 having an amino acid sequence of a VL CDR1, VL CDR2, and VL CDR3, respectively, of SEQ ID NO:699. In some embodiments, the third binding domain that binds to CD28 comprises: (i) a VH comprising a VH CDR1, a VH CDR2, and a VH CDR3 having an amino acid sequence of a VH CDR1, VH CDR2, and VH CDR3, respectively, of SEQ ID NO:693; and (ii) a VL comprising a VL CDR1, a VL CDR2, and a VL CDR3 having an amino acid sequence of a VL CDR1, VL CDR2, and VL CDR3, respectively, of SEQ ID NO:699. In some embodiments, the third binding domain that binds to CD28 comprises a VH having an amino acid sequence of SEQ ID NO:693. In some embodiments, the third binding domain that binds to CD28 comprises a VL having an amino acid sequence of SEQ ID NO:699. In some embodiments, the third binding domain that binds to CD28 comprises a VH having an amino acid sequence of SEQ ID NO:693, and a VL having an amino acid sequence of SEQ ID NO:699. In some embodiments, the third binding domain that binds to CD28 comprises a VH having an amino acid sequence having at least 95% identity to an amino acid sequence of SEQ ID NO:693. In some embodiments, the third binding domain that binds to CD28 comprises a VL having an amino acid sequence having at least 95% identity to an amino acid sequence of SEQ ID NO:699. In some embodiments, the third binding domain that binds to CD28 comprises a VH having an amino acid sequence having at least 95% identity to an amino acid sequence of SEQ ID NO:693, and a VL having an amino acid sequence having at least 95% identity to an amino acid sequence of SEQ ID NO:699.

[0284] In some embodiments, the trispecific antibodies include IgG-like molecules with complementary CH3 domains that promote heterodimerization; recombinant IgG-like dual targeting molecules, wherein the three sides of the molecule each contain the Fab fragment or part of the Fab fragment of at least three different antibodies; IgG fusion molecules, wherein full length IgG antibodies are fused to an extra Fab fragment or parts of Fab fragment; Fc fusion molecules, wherein single chain Fv molecules or stabilized diabodies are fused to heavy-chain constant-domains, Fc-regions or parts thereof, Fab fusion molecules, wherein different Fab-fragments are fused together; ScFv- and diabody-based and heavy chain antibodies (e.g., domain antibodies, nanobodies) wherein different single chain Fv molecules or different diabodies or different heavy-chain antibodies (e.g. domain antibodies, nanobodies) are fused to each other or to another protein or carrier molecule.

[0285] In some embodiments, IgG-like molecules with complementary CH3 domains molecules include the Triomab/Quadroma (Trion Pharma/Fresenius Biotech), the Knobs-into-Holes (Genentech), CrossMAbs (Roche) and the electrostatically-matched (Amgen), the LUZ-Y (Genentech), the Strand Exchange Engineered Domain body (SEEDbody) (EMD Serono), the Biclonic (Merus) and the DuoBody (Genmab A/S).

[0286] In some embodiments, recombinant IgG-like dual targeting molecules include Dual Targeting (DT)-Ig (GSK/Domantis), Two-in-one Antibody (Genentech), Cross-linked Mabs (Karmanos Cancer Center), mAb2 (F-Star) and CovX-body (CovX/Pfizer).

[0287] In some embodiments, IgG fusion molecules include Dual Variable Domain (DVD)-Ig (Abbott), IgG-like Bispecific (InnClone/Eli Lilly), Ts2Ab (MedImmune/AZ) and BsAb (Zymogenetics), HERCULES (Biogen Idec) and TvAb (Roche).

[0288] In some embodiments, Fc fusion molecules can include ScFv/Fc Fusions (Academic Institution), SCORPION (Emergent BioSolutions/Trubion, Zymogenetics/BMS), Dual Affinity Retargeting Technology (Fc-DART) (MacroGenics) and Dual(ScFv)₂-Fab (National Research Center for Antibody Medicine-China).

[0289] In some embodiments, Fab fusion trispecific antibodies include F(ab)₂ (Medarex/AMGEN), Dual-Action or Bis-Fab (Genentech), Dock-and-Lock (DNL) (ImmunoMedics), Bivalent Bispecific (Biotecnol) and Fab-Fv (UCB-Celltech). ScFv-, diabody-based, and domain antibodies, include but are not limited to, Trispecific T Cell Engager (BiTE) (Micromet), Tandem Diabody (Tandab) (Affimed), Dual Affinity Retargeting Technology (DART) (MacroGenics), Single-chain Diabody (Academic), TCR-like Antibodies (AIT, ReceptorLogics), Human Serum Albumin ScFv Fusion (Merrimack) and COMBODY (Epigen Biotech), dual targeting nanobodies (Ablynx), dual targeting heavy chain only domain antibodies.

[0290] “Homodimerization” as used herein refers to an interaction of two heavy chains having identical CH3 amino acid sequences. “Homodimer” as used herein refers to an antibody having two heavy chains with identical CH3 amino acid sequences.

[0291] “Heterodimerization” as used herein refers to an interaction of two heavy chains having non-identical CH3 amino acid sequences. “Heterodimer” as used herein refers to an antibody having two heavy chains with non-identical CH3 amino acid sequences.

[0292] The “knob-in-hole” strategy (see, e.g., PCT Publ. No. WO2006/028936) can be used to generate full length bispecific and trispecific antibodies. Briefly, selected amino acids forming the interface of the CH3 domains in human IgG can be mutated at positions affecting CH3 domain interactions to promote heterodimer formation. An amino acid with a small side chain (hole) is introduced into a heavy chain of an antibody specifically binding a first antigen and an amino acid with a large side chain (knob) is introduced into a heavy chain of an antibody specifically binding a second antigen. After co-expression of the two antibodies, a heterodimer is formed as a result of the preferential interaction of the heavy chain with a “hole” with the heavy chain with a “knob.” Exemplary CH3 substitution pairs forming a knob and a hole are (expressed as modified position in the first CH3 domain of the first heavy chain/modified position in the second CH3 domain of the second heavy chain): T366Y/F405A, T366W/F405W, F405W/Y407A, T394W/Y407T, T394S/Y407A, T366W/T394S, F405W/T394S and T366W/T366S_L368A_Y407V.

[0293] Other strategies such as promoting heavy chain heterodimerization using electrostatic interactions by substituting positively charged residues at one CH3 surface and negatively charged residues at a second CH3 surface can be used, as described in US Pat. Publ. No. US2010/0015133; US Pat. Publ. No. US2009/0182127; US Pat. Publ. No. US2010/028637; or US Pat. Publ. No. US2011/0123532. In other strategies, heterodimerization can be promoted by the following substitutions (expressed as modified position in the first CH3 domain of the first heavy chain/modified position in the second CH3 domain of the second heavy chain): L351Y_F405AY407V/T394W, T3661_K392M_T394W/F405A_Y407V, T366L_K392M_T394W/F405A_Y407V, L351Y_Y407A/T366A_K409F, L351Y_Y407A/T366V K409F Y407A/T366A_K409F, or T350V_L351Y_F405A Y407V/T350V_T366L_K392L_T394W as described in U.S. Pat. Publ. No. US2012/0149876 or U.S. Pat. Publ. No. US2013/0195849.

[0294] According to another particular aspect, the invention relates to an isolated Vβ17×CD28 trispecific antibody or antigen-binding fragment thereof that induces antibody-dependent cell-mediated cytotoxicity (ADCC). The trispecific antibody or antigen-binding fragment thereof can, for example, induce ADCC in vitro. The trispecific antibody or antigen-binding fragment thereof can induce ADCC with an EC₅₀ of less than about 1 pM. In certain embodiments, the Vβ17×CD28 trispecific antibody or antigen-binding fragment thereof comprises an IgG1, IgG2, IgG3, or IgG4 backbone. In one such embodiment, the Vβ17×CD28 trispecific antibody or antigen-binding fragment thereof has an antibody backbone of the IgG4 isotype. In one embodiment, the Vβ17×CD28 trispecific antibody is an anti-Vβ17/anti-BCMA/anti-CD28 trispecific antibody. In one embodiment, the Vβ17×CD28 trispecific antibody is an anti-Vβ17/anti-PSMA/anti-CD28 trispecific antibody.

[0295] In some embodiments described herein, ADCC elicited by the Vβ17×CD28 trispecific antibodies can also be enhanced by certain substitutions in the antibody Fc. Exemplary substitutions include, for example, substitutions at amino acid positions 256, 290, 298, 312, 356, 330, 333, 334, 360, 378 or 430 (residue numbering according to the EU index) as described in U.S. Pat. No. 6,737,056.

[0296] According to another particular aspect, the invention relates to an isolated Vβ17×CD28 trispecific antibody or antigen-binding fragment thereof capable of inducing T-cell dependent cytotoxicity in Vβ17-expressing cells, CD28-expressing cells, and/or target-expressing cells. In some embodiments, the target is BCMA. In some embodiment, the target is PSMA. The trispecific antibody or antigen-binding fragment thereof can, for example, induce T-cell dependent cytotoxicity in Vβ17-expressing cells, CD28-expressing cells and/or target-expressing cells in vitro with an EC₅₀ value of less than about 2 nM. In certain embodiments, the EC₅₀ is less than about 2.0 nM, less than about 1.9 nM, less than about 1.8 nM, less than about 1.7 nM, less than about 1.6 nM, less than about 1.5 nM, less than about 1.4 nM, less than about 1.3 nM, less than about 1.2 nM, less than about 1.1 nM, less than about 1.0 nM, less than about 0.9 nM, less than about 0.8 nM, less than about 0.7 nM, less than about 0.6 nM, less than about 0.5 nM, less than about 0.4 nM, less than about 0.3 nM, less than about 0.2 nM, and less than about 0.1 nM.

[0297] In some embodiments, the antibody described herein is a multispecific antibody.

[0298] In some embodiments, the trispecific antibody provided herein does not comprise a single chain antibody. In some embodiments, the trispecific antibody provided herein does not comprise a single domain antibody. In certain embodiments, the trispecific antibody provided herein does not comprise a nanobody. In certain embodiments, the trispecific antibody provided herein does not comprise a VHH antibody. In certain embodiments, the trispecific antibody provided herein does not comprise a llama antibody.

[0299] In certain embodiments, the trispecific antibody or antigen-binding fragment thereof induces T cell dependent cytotoxicity of a B cell in vitro with an EC₅₀ of less than about 160 pM, when assessed in vitro at an effector to target cell ratio of 1:1.

[0300] In some embodiments, Vβ17 is present on the surface of a T cell. In some embodiments, CD28 is present on the surface of a T cell. In some embodiments, CD28 is present on the surface of a T cell.

[0301] In some embodiments, the cancer antigen is present on the surface of a cancer cell. In some embodiments, BCMA is present on the surface of a target cell. In some embodiments, the Vβ17 is present on the surface of a T cell, BCMA is on the surface of a target cell and CD28 is on the surface of a T cell. In some embodiments, the Vβ17 is present on the surface of a T cell, BCMA is on the surface of a target cell and CD28 is on the surface of a target cell. In some embodiments, the target cell is killed when the trispecific antibody binds to the Vβ17 on the surface of the T cell, the CD28 on the surface of the T cell and the BCMA on the surface of the target cell. In some embodiments, the target cell is killed when the trispecific antibody binds to the Vβ17 on the surface of the T cell, the CD28 on the surface of the T cell and the BCMA on the surface of the target cell. In certain embodiments, the target cell is a B cell. In certain embodiments, the target is a B cell cancer cell.

[0302] In some embodiments, PSMA is present on the surface of a target cell. In some embodiments, the Vβ17 is present on the surface of a T cell, PSMA is on the surface of a target cell and CD28 is on the surface of a T cell. In some embodiments, the Vβ17 is present on the surface of a T cell, PSMA is on the surface of a target cell and CD28 is on the surface of a target cell. In some embodiments, the target cell is killed when the trispecific antibody binds to the Vβ17 on the surface of the T cell, the CD28 on the surface of the T cell and the PSMA on the surface of the target cell. In some embodiments, the target cell is killed when the trispecific antibody binds to the Vβ17 on the surface of the T cell, the CD28 on the surface of the T cell and the PSMA on the surface of the target cell. In certain embodiments, the target cell is a prostate cell. In certain embodiments, the target is a prostate cancer cell.

[0303] In some embodiments, the trispecific antibody induces T cell dependent cytotoxicity of the target cell in vitro with an EC₅₀ of less than about 500 pM. In some embodiments, the trispecific antibody induces T cell dependent cytotoxicity of the target cell in vitro with an EC₅₀ of less than about 300 pM. In some embodiments, the trispecific antibody induces T cell dependent cytotoxicity of the target cell in vitro with an EC₅₀ of less than about 160 pM. In some embodiments, the EC₅₀ is assessed with a mixture of effector T cells and target B cells. In some embodiments, the T cells are αβ T cells. In some embodiments, the effector cell to target cell ratio is about 0.01 to 1 to about 5 to 1. In some embodiments, the effector cell to target cell ratio is about 0.1 to 1 to about 2 to 1. In some embodiments, the effector cell to target cell ratio is about 1:1.

[0304] In certain embodiments, the EC₅₀ is less than about 1 pM, less than about 0.9 pM, less than about 0.8 pM, less than about 0.7 pM, less than about 0.6 pM, less than about 0.5 pM, less than about 0.4 pM, less than about 0.300 pM, less than about 0.2 pM, less than about 0.19 pM, less than about 0.18 pM, less than about 0.17 pM, less than about 0.16 pM, less than about 0.15 pM, less than about 0.14 pM, less than about 0.13 pM, less than about 0.12 pM, less than about 0.11 pM, less than about 0.1 pM, less than about 0.09 pM, less than about 0.08 pM, less than about 0.07 pM, less than about 0.06 pM, less than about 0.05 pM, less than about 0.04 pM, less than about 0.03 pM, less than about 0.02 pM, or less than about 0.01 pM. In certain embodiments, the EC₅₀ is less than about 1000 pM, less than about 900 pM, less than about 800 pM, less than about 700 pM, less than about 600 pM, less than about 500 pM, less than about 400 pM, less than about 300 pM, less than about 200 pM, less than about 190 pM, less than about 180 pM, less than about 170 pM, less than about 160 pM, less than about 150 pM, less than about 140 pM, less than about 130 pM, less than about 120 pM, less than about 110 pM, less than about 100 pM, less than about 90 pM, less than about 80 pM, less than about 70 pM, less than about 60 pM, less than about 50 pM, less than about 40 pM, less than about 30 pM, less than about 20 pM, or less than about 10 pM.

[0305] In certain embodiments, the effector to target cell ratio can, for example, be 0.01:1, 0.02:1, 0.03:1, 0.04:1, 0.05:1, 0.06:1, 0.07:1, 0.08:1, 0.09:1, 1:1, 2:1, 3:1, 4:1, 5:1, 6:1, 7:1, 8:1, 9:1, or 10:1.

[0306] In some embodiments of the trispecific antibody provided herein, the T cell releases cytokines when the trispecific antibody binds to CD28 on the surface of the T cell. In other embodiments provided herein is a method of activating a T cell comprising contacting the T cell with a trispecific antibody provided herein, wherein the T cell releases cytokines upon activation by the trispecific antibody. In some embodiments, the cytokine is a chemokine. In some embodiments, the cytokine is an interferon. In some embodiments, the cytokine is an interleukin. In some embodiments, the cytokine is a protein belonging to the tumour necrosis factor superfamily. In some embodiments, the chemokine is a CC chemokine. In some embodiments, the chemokine is a CXC chemokine. In some embodiments, the chemokine is a C chemokine or a CX3C chemokine. In some embodiments. In some embodiments, the interferon is a Type I interferon. In some embodiments, the interferon is a Type 2 interferon. In some embodiments, the interferon is a Type 3 interferon. In some embodiments, the interleukin is an IL-1. In some embodiments, the interleukin is an IL-2. In some embodiments, the interleukin is an IL-3. In some embodiments, the interleukin is an IL-4. In some embodiments, the interleukin is an IL-5. In some embodiments, the interleukin is an IL-6. In some embodiments, the interleukin is an IL-7. In some embodiments, the interleukin is an IL-8. In some embodiments, the interleukin is an IL-9. In some embodiments, the interleukin is an IL-10. In some embodiments, the interleukin is an IL-11. In some embodiments, the interleukin is an IL-12. In some embodiments, the interleukin is an IL-13. In some embodiments, the interleukin is an IL-15 or an IL-17. In some embodiments, the protein belonging to the tumour necrosis factor superfamily is a lymphotoxin alpha. In some embodiments, the protein belonging to the tumour necrosis factor superfamily is a tumor necrosis factor. In some embodiments, the protein belonging to the tumour necrosis factor superfamily is a lymphotoxin beta. In some embodiments, the protein belonging to the tumour necrosis factor superfamily is an OX40 ligand. In some embodiments, the protein belonging to the tumour necrosis factor superfamily is a CD40 ligand. In some embodiments, the protein belonging to the tumour necrosis factor superfamily is a Fas ligand. In some embodiments, the protein belonging to the tumour necrosis factor superfamily is a CD27 ligand. In some embodiments, the protein belonging to the tumour necrosis factor superfamily is a CD30 ligand. In some embodiments, the protein belonging to the tumour necrosis factor superfamily is a CD137 ligand. In some embodiments, the protein belonging to the tumour necrosis factor superfamily is a TNF-related apoptosis-inducing ligand. In some embodiments, the protein belonging to the tumour necrosis factor superfamily is a receptor activator of nuclear factor kappa-B ligand. In some embodiments, the protein belonging to the tumour necrosis factor superfamily is a TNF-related weak inducer of apoptosis. In some embodiments, the protein belonging to the tumour necrosis factor superfamily is a proliferation-inducing ligand. In some embodiments, the protein belonging to the tumour necrosis factor superfamily is a B-cell activating factor. In some embodiments, the protein belonging to the tumour necrosis factor superfamily is a LIGHT. In some embodiments, the protein belonging to the tumour necrosis factor superfamily is a vascular endothelial growth inhibitor. In some embodiments, the protein belonging to the tumour necrosis factor superfamily is a TNF superfamily member 18. In some embodiments, the protein belonging to the tumour necrosis factor superfamily is a or ectodysplasin A.

[0307] In certain embodiments, the concentration of the trispecific antibody or antigen-binding fragment thereof is about 0.000005 ng/mL, about 0.00005 ng/mL, about 0.0005, about 0.005 ng/mL, about 0.01 ng/mL, about 0.02 ng/mL, about 0.03 ng/mL, about 0.04 ng/mL, about 0.05 ng/mL, about 0.06 ng/mL, about 0.07 ng/mL, about 0.08 ng/mL, about 0.09 ng/mL, about 0.1 ng/mL, about 0.5 ng/mL, about 1.0 ng/mL, about 10 ng/mL, about 20 ng/mL about, about 30 ng/mL about 40 ng/mL, about 50 ng/mL, about 60 ng/mL, about 70 ng/mL, about 80 ng/mL, about 90 ng/mL, about 100 ng/mL, or about 1000 ng/mL.

[0308] In another aspect, provided herein is an antibody that competes for binding to Vβ17 with any of the Vβ17 antibodies described herein. In another aspect, provided herein is an antibody that binds to the same epitope as any of the Vβ17 antibodies described herein. In another aspect, provided is a Vβ17 antibody that binds an epitope on Vβ17 that overlaps with the epitope on Vβ17 bound by a Vβ17 antibody described herein. In some embodiments, the Vβ17 antibody comprises a VH CDR1, VH CDR2, and VH CDR3 of a Vβ17 antibody provided herein. In some embodiments, the Vβ17 antibody comprises a VL CDR1, VL CDR2, and VL CDR3 of a Vβ17 antibody provided herein. In some embodiments, the Vβ17 antibody comprises a VH CDR1, VH CDR2, VH CDR3, a VL CDR1, VL CDR2, and VL CDR3 of a Vβ17 antibody provided herein. In some embodiments, the Vβ17 antibody comprises a VH of a Vβ17 antibody provided herein. In some embodiments, the Vβ17 antibody comprises a VL of a Vβ17 antibody provided herein. In some embodiments, the Vβ17 antibody comprises a VH and a VL of a Vβ17 antibody provided herein. In some embodiments, the Vβ17 antibody comprises a VH CDR1, VH CDR2, VH CDR3, a VL CDR1, VL CDR2, and VL CDR3 of a Vβ17 antibody provided herein. In some embodiments, the VH CDR1, VH CDR2, VH CDR3, VL CDR1, VL CDR2, and VL CDR3 amino acid sequences of the Vβ17 antibody are according to the Kabat numbering system. In some embodiments, the VH CDR1, VH CDR2, VH CDR3, VL CDR1, VL CDR2, and VL CDR3 amino acid sequences of the Vβ17 antibody are according to the Chothia numbering system. In some embodiments, the VH CDR1, VH CDR2, VH CDR3, VL CDR1, VL CDR2, and VL CDR3 amino acid sequences of the Vβ17 antibody are according to the AbM numbering system. In some embodiments, the VH CDR1, VH CDR2, VH CDR3, VL CDR1, VL CDR2, and VL CDR3 amino acid sequences of the Vβ17 antibody are according to the Contact numbering system. In some embodiments, the VH CDR1, VH CDR2, VH CDR3, VL CDR1, VL CDR2, and VL CDR3 amino acid sequences of the Vβ17 antibody are according to the IMGT numbering system. In certain embodiments, the Vβ17 antibody is a multispecific antibody. In some embodiments, the Vβ17 antibody is a bispecific antibody. In some embodiments, the Vβ17 antibody is a trispecific antibody.

[0309] In another aspect, provided is an antibody that competes for binding to Vβ17 with a Vβ17 reference antibody. In another aspect, provided is a Vβ17 antibody that binds to the same Vβ17 epitope as a Vβ17 reference antibody. In another aspect, provided is a Vβ17 antibody that binds an epitope on Vβ17 that overlaps with the epitope on Vβ17 bound by a Vβ17 reference antibody. In some embodiments, the Vβ17 reference antibody comprises a VH CDR1, VH CDR2, and VH CDR3 of a Vβ17 reference antibody provided herein. In some embodiments, the Vβ17 reference antibody comprises a VL CDR1, VL CDR2, and VL CDR3 of a Vβ17 reference antibody provided herein. In some embodiments, the Vβ17 reference antibody comprises a VH CDR1, VH CDR2, VH CDR3, a VL CDR1, VL CDR2, and VL CDR3 of a Vβ17 reference antibody provided herein. In some embodiments, the Vβ17 reference antibody comprises a VH of a Vβ17 reference antibody provided herein. In some embodiments, the Vβ17 reference antibody comprises a VL of a Vβ17 reference antibody provided herein. In some embodiments, the Vβ17 reference antibody comprises a VH and a VL of a Vβ17 reference antibody provided herein. In some embodiments, the Vβ17 reference antibody comprises a VH CDR1, VH CDR2, VH CDR3, a VL CDR1, VL CDR2, and VL CDR3 of a Vβ17 reference antibody provided herein. In some embodiments, the VH CDR1, VH CDR2, VH CDR3, VL CDR1, VL CDR2, and VL CDR3 amino acid sequences of the Vβ17 reference antibody are according to the Kabat numbering system. In some embodiments, the VH CDR1, VH CDR2, VH CDR3, VL CDR1, VL CDR2, and VL CDR3 amino acid sequences of the Vβ17 reference antibody are according to the Chothia numbering system. In some embodiments, the VH CDR1, VH CDR2, VH CDR3, VL CDR1, VL CDR2, and VL CDR3 amino acid sequences of the Vβ17 reference antibody are according to the AbM numbering system. In some embodiments, the VH CDR1, VH CDR2, VH CDR3, VL CDR1, VL CDR2, and VL CDR3 amino acid sequences of the Vβ17 reference antibody are according to the Contact numbering system. In some embodiments, the VH CDR1, VH CDR2, VH CDR3, VL CDR1, VL CDR2, and VL CDR3 amino acid sequences of the Vβ17 reference antibody are according to the IMGT numbering system. In certain embodiments, the antibody is a multispecific antibody. In some embodiments, the antibody is a bispecific antibody. In certain embodiments, the Vβ17 reference antibody is a multispecific antibody. In some embodiments, the Vβ17 reference antibody is a bispecific antibody. In some embodiments, the Vβ17 reference antibody is a trispecific antibody.

[0310] In another aspect, provided herein is an antibody that competes for binding to CD28 with any of the CD28 antibodies described herein. In another aspect, provided herein is an antibody that binds to the same epitope as any of the CD28 antibodies described herein. In another aspect, provided is a CD28 antibody that binds an epitope on CD28 that overlaps with the epitope on CD28 bound by a CD28 antibody described herein. In some embodiments, the CD28 antibody comprises a VH CDR1, VH CDR2, and VH CDR3 of a CD28 antibody provided herein. In some embodiments, the CD28 antibody comprises a VL CDR1, VL CDR2, and VL CDR3 of a CD28 antibody provided herein. In some embodiments, the CD28 antibody comprises a VH CDR1, VH CDR2, VH CDR3, a VL CDR1, VL CDR2, and VL CDR3 of a CD28 antibody provided herein. In some embodiments, the CD28 antibody comprises a VH of a CD28 antibody provided herein. In some embodiments, the CD28 antibody comprises a VL of a CD28 antibody provided herein. In some embodiments, the CD28 antibody comprises a VH and a VL of a CD28 antibody provided herein. In some embodiments, the CD28 antibody comprises a VH CDR1, VH CDR2, VH CDR3, a VL CDR1, VL CDR2, and VL CDR3 of a CD28 antibody provided herein. In some embodiments, the VH CDR1, VH CDR2, VH CDR3, VL CDR1, VL CDR2, and VL CDR3 amino acid sequences of the CD28 antibody are according to the Kabat numbering system. In some embodiments, the VH CDR1, VH CDR2, VH CDR3, VL CDR1, VL CDR2, and VL CDR3 amino acid sequences of the CD28 antibody are according to the Chothia numbering system. In some embodiments, the VH CDR1, VH CDR2, VH CDR3, VL CDR1, VL CDR2, and VL CDR3 amino acid sequences of the CD28 antibody are according to the AbM numbering system. In some embodiments, the VH CDR1, VH CDR2, VH CDR3, VL CDR1, VL CDR2, and VL CDR3 amino acid sequences of the CD28 antibody are according to the Contact numbering system. In some embodiments, the VH CDR1, VH CDR2, VH CDR3, VL CDR1, VL CDR2, and VL CDR3 amino acid sequences of the CD28 antibody are according to the IMGT numbering system. In certain embodiments, the CD28 antibody is a multispecific antibody. In some embodiments, the CD28 antibody is a bispecific antibody. In some embodiments, the CD28 antibody is a trispecific antibody.

[0311] In another aspect, provided is an antibody that competes for binding to CD28 with a CD28 reference antibody. In another aspect, provided is a CD28 antibody that binds to the same CD28 epitope as a CD28 reference antibody. In another aspect, provided is a CD28 antibody that binds an epitope on CD28 that overlaps with the epitope on CD28 bound by a CD28 reference antibody. In some embodiments, the CD28 reference antibody comprises a VH CDR1, VH CDR2, and VH CDR3 of a CD28 reference antibody provided herein. In some embodiments, the CD28 reference antibody comprises a VL CDR1, VL CDR2, and VL CDR3 of a CD28 reference antibody provided herein. In some embodiments, the CD28 reference antibody comprises a VH CDR1, VH CDR2, VH CDR3, a VL CDR1, VL CDR2, and VL CDR3 of a CD28 reference antibody provided herein. In some embodiments, the CD28 reference antibody comprises a VH of a CD28 reference antibody provided herein. In some embodiments, the CD28 reference antibody comprises a VL of a CD28 reference antibody provided herein. In some embodiments, the CD28 reference antibody comprises a VH and a VL of a CD28 reference antibody provided herein. In some embodiments, the CD28 reference antibody comprises a VH CDR1, VH CDR2, VH CDR3, a VL CDR1, VL CDR2, and VL CDR3 of a CD28 reference antibody provided herein. In some embodiments, the VH CDR1, VH CDR2, VH CDR3, VL CDR1, VL CDR2, and VL CDR3 amino acid sequences of the CD28 reference antibody are according to the Kabat numbering system. In some embodiments, the VH CDR1, VH CDR2, VH CDR3, VL CDR1, VL CDR2, and VL CDR3 amino acid sequences of the CD28 reference antibody are according to the Chothia numbering system. In some embodiments, the VH CDR1, VH CDR2, VH CDR3, VL CDR1, VL CDR2, and VL CDR3 amino acid sequences of the CD28 reference antibody are according to the AbM numbering system. In some embodiments, the VH CDR1, VH CDR2, VH CDR3, VL CDR1, VL CDR2, and VL CDR3 amino acid sequences of the CD28 reference antibody are according to the Contact numbering system. In some embodiments, the VH CDR1, VH CDR2, VH CDR3, VL CDR1, VL CDR2, and VL CDR3 amino acid sequences of the CD28 reference antibody are according to the IMGT numbering system. In certain embodiments, the antibody is a multispecific antibody. In some embodiments, the antibody is a bispecific antibody. In certain embodiments, the CD28 reference antibody is a multispecific antibody. In some embodiments, the CD28 reference antibody is a bispecific antibody. In some embodiments, the CD28 reference antibody is a trispecific antibody.

[0312] In some embodiments described herein, immune effector properties of the trispecific antibodies provided herein can be enhanced or silenced through Fc modifications by techniques known to those skilled in the art. For example, Fc effector functions such as Clq binding, complement dependent cytotoxicity (CDC), antibody-dependent cell-mediated cytotoxicity (ADCC), antibody-dependent cell-mediated phagocytosis (ADCP), down regulation of cell surface receptors (e.g., B cell receptor; BCR), etc. can be provided and/or controlled by modifying residues in the Fc responsible for these activities.

[0313] “Antibody-dependent cell-mediated cytotoxicity” or “ADCC” refers to a cell-mediated reaction in which non-specific cytotoxic cells that express Fc receptors (FcRs) (e.g. Natural Killer (NK) cells, neutrophils, and macrophages) recognize bound antibody on a target cell and subsequently cause lysis of the target cell.

[0314] The ability of antibodies to induce ADCC can be enhanced by engineering their oligosaccharide component. Human IgG1 or IgG3 are N-glycosylated at Asn297 with the majority of the glycans in the well-known biantennary G0, G0F, G1, G1F, G2 or G2F forms. Antibodies produced by non-engineered CHO cells typically have a glycan fucose content of about at least 85%. The removal of the core fucose from the biantennary complex-type oligosaccharides attached to the Fc regions enhances the ADCC of antibodies via improved FcγRIIIa binding without altering antigen binding or CDC activity. Such Abs can be achieved using different methods reported to lead to the successful expression of relatively high defucosylated antibodies bearing the biantennary complex-type of Fc oligosaccharides such as control of culture osmolality (Konno et al., Cytotechnology 64:249-65, 2012), application of a variant CHO line Lec13 as the host cell line (Shields et al., J Biol Chem 277:26733-26740, 2002), application of a variant CHO line EB66 as the host cell line (Olivier et al., MAbs; 2(4), 2010; Epub ahead of print; PMID:20562582), application of a rat hybridoma cell line YB2/0 as the host cell line (Shinkawa et al., J Biol Chem 278:3466-3473, 2003), introduction of small interfering RNA specifically against the α-1,6-fucosyltrasferase (FUT8) gene (Mori et al., Biotechnol Bioeng 88:901-908, 2004), or coexpression of 0-1,4-N-acetylglucosaminyltransferase III and golgi α-mannosidase II or a potent alpha-mannosidase I inhibitor, kifunensine (Ferrara et al., J Biol Chem 281:5032-5036, 2006, Ferrara et al., Biotechnol Bioeng 93:851-861, 2006; Xhou et al., Biotechnol Bioeng 99:652-65, 2008).

[0315] According to another particular aspect, the invention relates to an isolated Vβ17×CD28 trispecific antibody or antigen-binding fragment thereof, wherein the Vβ17×CD28 trispecific antibody or antigen-binding fragment thereof is chimeric.

[0316] According to another particular aspect, the invention relates to an isolated Vβ17×CD28 trispecific antibody or antigen-binding fragment thereof, wherein the Vβ17×CD28 trispecific antibody or antigen-binding fragment thereof is human or humanized. In some embodiments, the Vβ17×CD28 trispecific antibody is an anti-Vβ17/anti-TAA/anti-CD28 trispecific antibody. In some embodiments, the Vβ17×CD28 trispecific antibody is an anti-Vβ17/anti-BCMA/anti-CD28 trispecific antibody. In some embodiments, the Vβ17×CD28 trispecific antibody is an anti-Vβ17/anti-PSMA/anti-CD28 trispecific antibody.

[0317] In another general aspect, the invention relates to an isolated humanized Vβ17×CD28 trispecific antibody or antigen-binding fragment thereof.

[0318] In certain embodiments, the isolated humanized anti-Vβ17/anti-BCMA/anti-CD28 trispecific antibody or antigen-binding fragment thereof comprises an amino acid sequence with at least 85%, preferably 90%, more preferably 95% or more, such as 95%, 96%, 97%, 98%, or 99% identity to the amino acid sequence of SEQ ID NO:28. In certain embodiments, the humanized Vβ17 monoclonal antibody or antigen-binding fragment thereof comprises the amino acid sequence of SEQ ID NO:28.

[0319] In some embodiments, the first binding domain is human. In some embodiments, the second binding domain is human. In some embodiments, the third binding domain is human. In other embodiments, the first binding domain and the second binding domain are human. In other embodiments, the first binding domain and the third binding domain are human. In other embodiments, the second binding domain and the third binding domain are human. In other embodiments, the first binding domain the second binding domain and the third binding domain are human. In some embodiments, the first binding domain is humanized. In some embodiments, the second binding domain is humanized. In some embodiments, the third binding domain is humanized. In other embodiments, the first binding domain and the second binding domain are humanized. In other embodiments, the first binding domain and the third binding domain are humanized. In other embodiments, the second binding domain and the third binding domain are humanized. In other embodiments, the first binding domain the second binding domain and the third binding domain are humanized. In other embodiments, the first binding domain is human and the second binding domain and third binding domain are humanized. In other embodiments, the second binding domain is human and the first binding domain and third binding domain are humanized. In other embodiments, the third binding domain is human and the second binding domain and first binding domain are humanized. In other embodiments, the first binding domain is humanized and the second binding domain and third binding domain are human. In other embodiments, the second binding domain is humanized and the first binding domain and third binding domain are human. In other embodiments, the third binding domain is humanized and the second binding domain and first binding domain are human.

[0320] In some embodiments, the trispecific antibody is an IgG antibody. In some embodiments, the IgG antibody is an IgG1 antibody. In some embodiments, the IgG antibody is an IgG2 antibody. In some embodiments, the IgG antibody is an IgG3 antibody. In some embodiments, the IgG antibody is an IgG4 antibody.

[0321] In some embodiments, the trispecific antibody is multivalent. In some embodiments, the trispecific antibody is capable of binding at least five antigens.

[0322] In certain embodiments, the trispecific antibodies provided herein are part of a multispecific antibody. In some embodiments, the multispecific antibody comprises a first binding domain that binds to a Vβ17 antigen. In some embodiments, the multispecific antibody comprises a first binding domain that binds to a Vβ17 antigen and comprises a second binding domain that binds to a cancer antigen, as provided herein. In some embodiments, the multispecific antibody comprises a first binding domain that binds to a Vβ17 antigen, a second binding domain that binds to a cancer antigen, and a third binding domain that binds to a CD28 antigen, as provided herein. In some embodiments, the multispecific antibody comprises a first binding domain that binds to a Vβ17 antigen and comprises a second binding domain that binds to a TAA, as provided herein. In some embodiments, the multispecific antibody comprises a first binding domain that binds to a Vβ17 antigen, a second binding domain that binds to a TAA, and a third binding domain that binds to a CD28 antigen, as provided herein. In some embodiments, the multispecific antibody comprises a first binding domain that binds to a Vβ17 antigen and comprises a second binding domain that binds to a BCMA antigen, as provided herein. In some embodiments, the multispecific antibody comprises a first binding domain that binds to a Vβ17 antigen, a second binding domain that binds to a BCMA antigen, and a third binding domain that binds to a CD28 antigen, as provided herein. In some embodiments, the multispecific antibody comprises a first binding domain that binds to a Vβ17 antigen and comprises a second binding domain that binds to a PSMA antigen, as provided herein. In some embodiments, the multispecific antibody comprises a first binding domain that binds to a Vβ17 antigen, a second binding domain that binds to a PSMA antigen, and a third binding domain that binds to a CD28 antigen, as provided herein. In some embodiments of the various antibodies provided herein, the antibody binds to an epitope of a given antigen.

[0323] Also provided are isolated nucleic acids encoding the trispecific antibodies or antigen-binding fragments thereof disclosed herein. Also provided are vectors comprising the isolated nucleic acids encoding the trispecific antibodies or antigen-binding fragments thereof disclosed herein. Also provided are host cells comprising the vectors comprising the isolated nucleic acids disclosed herein.

[0324] In certain aspects, provided is a nucleic acid encoding an antibody that binds to Vβ17 provided herein. Also provided is a vector comprising a nucleic acid encoding an antibody that binds to Vβ17 provided herein. Also provided is a host cell comprising a vector comprising a nucleic acid encoding an antibody that binds to Vβ17 provided herein. Also provided is a kit comprising the vector comprising a nucleic acid encoding an antibody that binds to Vβ17 provided herein, and packaging for the same. In certain aspects, provided is a nucleic acid encoding an antibody that binds to BCMA provided herein. Also provided is a vector comprising a nucleic acid encoding an antibody that binds to BCMA provided herein. Also provided is a host cell comprising a vector comprising a nucleic acid encoding an antibody that binds to BCMA provided herein. Also provided is a kit comprising the vector comprising a nucleic acid encoding an antibody that binds to BCMA provided herein, and packaging for the same. In certain aspects, provided is a nucleic acid encoding an antibody that binds to PSMA provided herein. Also provided is a vector comprising a nucleic acid encoding an antibody that binds to PSMA provided herein. Also provided is a host cell comprising a vector comprising a nucleic acid encoding an antibody that binds to PSMA provided herein. Also provided is a kit comprising the vector comprising a nucleic acid encoding an antibody that binds to PSMA provided herein, and packaging for the same. In certain aspects, provided is a nucleic acid encoding an antibody that binds to CD28 provided herein. Also provided is a vector comprising a nucleic acid encoding an antibody that binds to CD28 provided herein. Also provided is a host cell comprising a vector comprising a nucleic acid encoding an antibody that binds to CD28 provided herein. Also provided is a kit comprising the vector comprising a nucleic acid encoding an antibody that binds to CD28 provided herein, and packaging for the same.

[0325] Also provided is a nucleic acid encoding a trispecific antibody comprising: (a) a first binding domain that binds to Vβ17, (b) a second binding domain that binds to a cancer antigen, and (c) a third binding domain that binds to CD28, as provided herein. Also provided is a vector comprising a nucleic acid encoding a trispecific antibody that binds to Vβ17, a cancer antigen and CD28, provided herein. Also provided is a nucleic acid encoding a trispecific antibody comprising: (a) a first binding domain that binds to Vβ17, (b) a second binding domain that binds to BCMA, and (c) a third binding domain that binds to CD28, as provided herein. Also provided is a vector comprising a nucleic acid encoding a trispecific antibody that binds to Vβ17, BCMA and CD28, provided herein. Also provided is a nucleic acid encoding a trispecific antibody comprising: (a) a first binding domain that binds to Vβ17, (b) a second binding domain that binds to PSMA, and (c) a third binding domain that binds to CD28, as provided herein. Also provided is a vector comprising a nucleic acid encoding a trispecific antibody that binds to Vβ17, PSMA and CD28, provided herein. Also provided is a host cell comprising a vector comprising a nucleic acid encoding the provided trispecific antibody. Also provided is a kit comprising the vector comprising a nucleic acid encoding the provided trispecific antibody, and packaging for the same.

[0326] In another general aspect, the invention relates to an isolated nucleic acid encoding a trispecific antibody or antigen-binding fragment thereof disclosed herein. It will be appreciated by those skilled in the art that the coding sequence of a protein can be changed (e.g., replaced, deleted, inserted, etc.) without changing the amino acid sequence of the protein. Accordingly, it will be understood by those skilled in the art that nucleic acid sequences encoding trispecific antibodies provided herein can be altered without changing the amino acid sequences of the proteins.

[0327] In another general aspect, the invention relates to a vector comprising an isolated nucleic acid encoding a trispecific antibody or antigen-binding fragment thereof disclosed herein. Any vector known to those skilled in the art in view of the present disclosure can be used, such as a plasmid, a cosmid, a phage vector or a viral vector. In some embodiments, the vector is a recombinant expression vector such as a plasmid. The vector can include any element to establish a conventional function of an expression vector, for example, a promoter, ribosome binding element, terminator, enhancer, selection marker, and origin of replication. The promoter can be a constitutive, inducible or repressible promoter. A number of expression vectors capable of delivering nucleic acids to a cell are known in the art and can be used herein for production of an antibody or antigen-binding fragment thereof in the cell. Conventional cloning techniques or artificial gene synthesis can be used to generate a recombinant expression vector according to embodiments provided herein. Such techniques are well known to those skilled in the art in view of the present disclosure.

[0328] In another general aspect, the invention relates to a host cell comprising an isolated nucleic acid encoding a trispecific antibody or an antigen-binding fragment thereof provided herein. Any host cell known to those skilled in the art in view of the present disclosure can be used for recombinant expression of antibodies or antigen-binding fragments thereof provided herein. In some embodiments, the host cells are E. coli TG1 or BL21 cells (for expression of, e.g., an scFv or Fab antibody), CHO-DG44 or CHO-K1 cells or HEK293 cells (for expression of, e.g., a full-length IgG antibody). According to particular embodiments, the recombinant expression vector is transformed into host cells by conventional methods such as chemical transfection, heat shock, or electroporation, where it is stably integrated into the host cell genome such that the recombinant nucleic acid is effectively expressed.

[0329] In another general aspect, provided is a method of producing a trispecific antibody or antigen-binding fragment thereof disclosed herein. The methods comprise culturing a cell comprising a nucleic acid encoding the trispecific antibody or antigen-binding fragment thereof under conditions to produce a trispecific antibody or antigen-binding fragment thereof disclosed herein and recovering the antibody or antigen-binding fragment thereof from the cell or cell culture (e.g., from the supernatant). Expressed antibodies or antigen-binding fragments thereof can be harvested from the cells and purified according to conventional techniques known in the art and as described herein.

[0330] Also provided are methods of producing the trispecific antibodies or antigen-binding fragments thereof disclosed herein. The methods can comprise culturing a cell comprising a nucleic acid encoding two heavy chains and two light chains of the trispecific antibody under conditions to produce the heavy and light chains or an antigen-binding fragment thereof, and recovering the heavy and light chains of the trispecific antibody or an antigen-binding fragment thereof from the cell or culture. Following collection of heavy and light chains of the trispecific antibody, the heavy and light chain pairs are mixed in conditions suitable to allow for self-assembly, after which the self-assembled trispecific antibodies are collected.

### Pharmaceutical Compositions

[0331] In another general aspect, the invention relates to a pharmaceutical composition comprising the trispecific antibody or antigen-binding fragment thereof provided herein and a pharmaceutically acceptable carrier. Also provided is a pharmaceutical composition comprising an antibody that binds to Vβ17 provided herein, and a pharmaceutically acceptable carrier. Also provided is a pharmaceutical composition comprising an antibody that binds to a cancer antigen provided herein, and a pharmaceutically acceptable carrier. Also provided is a pharmaceutical composition comprising an antibody that binds to BCMA provided herein, and a pharmaceutically acceptable carrier. Also provided is a pharmaceutical composition comprising an antibody that binds to PSMA provided herein, and a pharmaceutically acceptable carrier. Also provided is a pharmaceutical composition comprising an antibody that binds to CD28 provided herein, and a pharmaceutically acceptable carrier. Also provided is a method of producing the pharmaceutical composition, comprising combining the antibody with a pharmaceutically acceptable carrier to obtain the pharmaceutical composition. In another aspect, provided herein is a pharmaceutical composition comprising: (a) a first binding domain that binds to Vβ17, (b) a second binding domain that binds to a cancer antigen, and (c) a third binding domain that binds to CD28, and a pharmaceutically acceptable carrier. In another aspect, provided herein is a pharmaceutical composition comprising: (a) a first binding domain that binds to Vβ17, (b) a second binding domain that binds to BCMA, and (c) a third binding domain that binds to CD28, and a pharmaceutically acceptable carrier In another aspect, provided herein is a pharmaceutical composition comprising: (a) a first binding domain that binds to Vβ17, (b) a second binding domain that binds to PSMA, and (c) a third binding domain that binds to CD28, and a pharmaceutically acceptable carrier. Any of the trispecific antibodies provided herein are contemplated in the pharmaceutical compositions. The term “pharmaceutical composition” as used herein means a product comprising an antibody provided herein together with a pharmaceutically acceptable carrier. Antibodies provided herein and compositions comprising them are also useful in the manufacture of a medicament for therapeutic applications mentioned herein.

[0332] Also provided are methods of producing compositions comprising the trispecific antibodies or antigen-binding fragments disclosed herein, such as buffered compositions or purified compositions and the like. For example, the methods may comprise combining the trispecific antibody or antigen-binding fragment thereof with a buffer acceptable that is acceptable for storage and use of the trispecific antibody.

[0333] As used herein, the term “carrier” refers to any excipient, diluent, filler, salt, buffer, stabilizer, solubilizer, oil, lipid, lipid containing vesicle, microsphere, liposomal encapsulation, or other material well known in the art for use in pharmaceutical formulations. It will be understood that the characteristics of the carrier, excipient or diluent will depend on the route of administration for a particular application. As used herein, the term “pharmaceutically acceptable carrier” refers to a non-toxic material that does not interfere with the effectiveness of a composition according to the invention or the biological activity of a composition provided herein. According to particular embodiments, in view of the present disclosure, any pharmaceutically acceptable carrier suitable for use in an antibody pharmaceutical composition can be used herein.

[0334] The formulation of pharmaceutically active ingredients with pharmaceutically acceptable carriers is known in the art, e.g., Remington: The Science and Practice of Pharmacy (e.g. 21st edition (2005), and any later editions). Non-limiting examples of additional ingredients include: buffers, diluents, solvents, tonicity regulating agents, preservatives, stabilizers, and chelating agents. One or more pharmaceutically acceptable carriers can be used in formulating the pharmaceutical compositions provided herein.

[0335] In one embodiment of the invention, the pharmaceutical composition is a liquid formulation. A preferred example of a liquid formulation is an aqueous formulation, i.e., a formulation comprising water. The liquid formulation can comprise a solution, a suspension, an emulsion, a microemulsion, a gel, and the like. An aqueous formulation typically comprises at least 50% w/w water, or at least 60%, 70%, 75%, 80%, 85%, 90%, or at least 95% w/w of water.

[0336] In one embodiment, the pharmaceutical composition can be formulated as an injectable which can be injected, for example, via an injection device (e.g., a syringe or an infusion pump). The injection can be delivered subcutaneously, intramuscularly, intraperitoneally, intravitreally, or intravenously, for example.

[0337] In another embodiment, the pharmaceutical composition is a solid formulation, e.g., a freeze-dried or spray-dried composition, which can be used as is, or whereto the physician or the patient adds solvents, and/or diluents prior to use. Solid dosage forms can include tablets, such as compressed tablets, and/or coated tablets, and capsules (e.g., hard or soft gelatin capsules). The pharmaceutical composition can also be in the form of sachets, dragees, powders, granules, lozenges, or powders for reconstitution, for example.

[0338] The dosage forms can be immediate release, in which case they can comprise a water-soluble or dispersible carrier, or they can be delayed release, sustained release, or modified release, in which case they can comprise water-insoluble polymers that regulate the rate of dissolution of the dosage form in the gastrointestinal tract or under the skin.

[0339] In other embodiments, the pharmaceutical composition can be delivered intranasally, intrabuccally, or sublingually.

[0340] The pH in an aqueous formulation can be between pH 3 and pH 10. In one embodiment provided herein, the pH of the formulation is from about 7.0 to about 9.5. In another embodiment provided herein, the pH of the formulation is from about 3.0 to about 7.0.

[0341] In another embodiment provided herein, the pharmaceutical composition comprises a buffer. Non-limiting examples of buffers include: arginine, aspartic acid, bicine, citrate, disodium hydrogen phosphate, fumaric acid, glycine, glycylglycine, histidine, lysine, maleic acid, malic acid, sodium acetate, sodium carbonate, sodium dihydrogen phosphate, sodium phosphate, succinate, tartaric acid, tricine, and tris(hydroxymethyl)-aminomethane, and mixtures thereof. The buffer can be present individually or in the aggregate, in a concentration from about 0.01 mg/ml to about 50 mg/ml, for example from about 0.1 mg/ml to about 20 mg/ml. Pharmaceutical compositions comprising each one of these specific buffers constitute alternative embodiments provided herein.

[0342] In another embodiment provided herein, the pharmaceutical composition comprises a preservative. Non-limiting examples of preservatives include: benzethonium chloride, benzoic acid, benzyl alcohol, bronopol, butyl 4-hydroxybenzoate, chlorobutanol, chlorocresol, chlorohexidine, chlorphenesin, o-cresol, m-cresol, p-cresol, ethyl 4-hydroxybenzoate, imidurea, methyl 4-hydroxybenzoate, phenol, 2-phenoxyethanol, 2-phenylethanol, propyl 4-hydroxybenzoate, sodium dehydroacetate, thiomerosal, and mixtures thereof. The preservative can be present individually or in the aggregate, in a concentration from about 0.01 mg/ml to about 50 mg/ml, for example from about 0.1 mg/ml to about 20 mg/ml. Pharmaceutical compositions comprising each one of these specific preservatives constitute alternative embodiments provided herein.

[0343] In another embodiment provided herein, the pharmaceutical composition comprises an isotonic agent. Non-limiting examples of isotonic agents include a salt (such as sodium chloride), an amino acid (such as glycine, histidine, arginine, lysine, isoleucine, aspartic acid, tryptophan, and threonine), an alditol (such as glycerol, 1,2-propanediol propyleneglycol), 1,3-propanediol, and 1,3-butanediol), polyethyleneglycol (e.g. PEG400), and mixtures thereof. Another example of an isotonic agent includes a sugar. Non-limiting examples of sugars can include mono-, di-, or polysaccharides, or water-soluble glycans, including for example fructose, glucose, mannose, sorbose, xylose, maltose, lactose, sucrose, trehalose, dextran, pullulan, dextrin, cyclodextrin, alpha and beta-HPCD, soluble starch, hydroxyethyl starch, and sodium carboxymethyl-cellulose. Another example of an isotonic agent is a sugar alcohol, wherein the term “sugar alcohol” is defined as a C(4-8) hydrocarbon having at least one —OH group. Non-limiting examples of sugar alcohols include mannitol, sorbitol, inositol, galactitol, dulcitol, xylitol, and arabitol. The isotonic agent can be present individually or in the aggregate, in a concentration from about 0.01 mg/ml to about 50 mg/ml, for example from about 0.1 mg/ml to about 20 mg/ml. Pharmaceutical compositions comprising each one of these specific isotonic agents constitute alternative provided herein.

[0344] In another embodiment provided herein, the pharmaceutical composition comprises a chelating agent. Non-limiting examples of chelating agents include citric acid, aspartic acid, salts of ethylenediaminetetraacetic acid (EDTA), and mixtures thereof. The chelating agent can be present individually or in the aggregate, in a concentration from about 0.01 mg/ml to about 50 mg/ml, for example from about 0.1 mg/ml to about 20 mg/ml. Pharmaceutical compositions comprising each one of these specific chelating agents constitute alternative embodiments of the invention.

[0345] In another embodiment provided herein, the pharmaceutical composition comprises a stabilizer. Non-limiting examples of stabilizers include one or more aggregation inhibitors, one or more oxidation inhibitors, one or more surfactants, and/or one or more protease inhibitors.

[0346] In another embodiment provided herein, the pharmaceutical composition comprises a stabilizer, wherein said stabilizer is carboxy-/hydroxycellulose and derivates thereof (such as HPC, HPC-SL, HPC-L and HPMC), cyclodextrins, 2-methylthioethanol, polyethylene glycol (such as PEG 3350), polyvinyl alcohol (PVA), polyvinyl pyrrolidone, salts (such as sodium chloride), sulphur-containing substances such as monothioglycerol), or thioglycolic acid. The stabilizer can be present individually or in the aggregate, in a concentration from about 0.01 mg/ml to about 50 mg/ml, for example from about 0.1 mg/ml to about 20 mg/ml. Pharmaceutical compositions comprising each one of these specific stabilizers constitute alternative embodiments provided herein.

[0347] In further embodiments provided herein, the pharmaceutical composition comprises one or more surfactants, preferably a surfactant, at least one surfactant, or two different surfactants. The term “surfactant” refers to any molecules or ions that are comprised of a water-soluble (hydrophilic) part, and a fat-soluble (lipophilic) part. The surfactant can, for example, be selected from the group consisting of anionic surfactants, cationic surfactants, nonionic surfactants, and/or zwitterionic surfactants. The surfactant can be present individually or in the aggregate, in a concentration from about 0.1 mg/ml to about 20 mg/ml. Pharmaceutical compositions comprising each one of these specific surfactants constitute alternative embodiments provided herein.

[0348] In a further embodiment provided herein, the pharmaceutical composition comprises one or more protease inhibitors, such as, e.g., EDTA, and/or benzamidine hydrochloric acid (HCl). The protease inhibitor can be present individually or in the aggregate, in a concentration from about 0.1 mg/ml to about 20 mg/ml. Pharmaceutical compositions comprising each one of these specific protease inhibitors constitute alternative embodiments provided herein.

[0349] In another general aspect, the invention relates to a method of producing a pharmaceutical composition comprising a trispecific antibody or antigen-binding fragment thereof disclosed herein, comprising combining a trispecific antibody or antigen-binding fragment thereof with a pharmaceutically acceptable carrier to obtain the pharmaceutical composition.

### Methods of Use

[0350] In another aspect, provided herein is a method of activating a T cell expressing Vβ17, comprising contacting the T cell with the trispecific antibody, as provided herein. In another aspect, provided herein is a method of activating a T cell expressing CD28, comprising contacting the T cell with the trispecific antibody, as provided herein. In some embodiments, the contacting results in an increase in cytokine expression, as compared to a control T cell expressing CD28.

[0351] In another aspect, provided herein is a method of inactivating a T cell expressing Vβ17, comprising contacting the T cell with the trispecific antibody, as provided herein. In another aspect, provided herein is a method of inactivating a T cell expressing CD28, comprising contacting the T cell with the trispecific antibody, as provided herein.

[0352] In another aspect, provided herein is a method of blocking activation of a T cell expressing Vβ17, comprising contacting the T cell with the trispecific antibody, as provided herein. In another aspect, provided herein is a method of blocking activation of a T cell expressing CD28, comprising contacting the T cell with the trispecific antibody, as provided herein.

[0353] In another aspect, provided herein is a method of modulating the activation of a T cell expressing Vβ17, comprising contacting the T cell with the trispecific antibody, as provided herein. In another aspect, provided herein is a method of modulating the activation of a T cell expressing CD28, comprising contacting the T cell with the trispecific antibody, as provided herein.

[0354] In another aspect, provided herein is a method of directing a T cell expressing Vβ17 to a target cell, the method comprising contacting the T cell with a trispecific antibody provided herein. In some embodiments, the contacting directs the T cell to the target cell. In another aspect, provided herein is a method of directing a T cell expressing CD28 to a target cell, the method comprising contacting the T cell with a trispecific antibody provided herein. In some embodiments, the contacting directs the T cell to the target cell. In another aspect, provided herein is a method of directing a T cell expressing Vβ17 and CD28 to a target cell, the method comprising contacting the T cell with a trispecific antibody provided herein. In some embodiments, the contacting directs the T cell to the target cell.

[0355] Also provided is a method of targeting a cancer antigen on the surface of a target cell, the method comprising exposing the target cell to a Vβ17×CD28 trispecific antibody or antigen binding fragment thereof provided herein. Also provided is a method of targeting a cancer antigen on the surface of a target cell, the method comprising exposing the target cell to a pharmaceutical composition comprising a Vβ17×CD28 trispecific antibody or antigen binding fragment thereof provided herein.

[0356] In one embodiment, the Vβ17×CD28 trispecific antibody further binds a cancer antigen. In certain embodiments, the cancer antigen is a TAA. In some embodiments, the cancer antigen is BCMA. In some embodiments, the cancer antigen is PSMA. In some embodiments, the target cell is a cancer cell. In some embodiments, the target cell is a B cell. In some embodiments, the target cell is a B cell cancer cell. In some embodiments, the target cell is a prostate cell. In some embodiments, the target cell is a prostate cancer cell.

[0357] The functional activity of trispecific antibodies and antigen-binding fragments thereof that bind Vβ17, a cancer antigen and/or CD28 can be characterized by methods known in the art and as described herein. Methods for characterizing antibodies and antigen-binding fragments thereof that bind Vβ17, a cancer antigen and/or CD28 include, but are not limited to, affinity and specificity assays including Biacore, ELISA, and OctetRed analysis; binding assays to detect the binding of antibodies to target cells by FACS; binding assays to detect the binding of antibodies to Vβ17 on T cells, a cancer antigen on target cells, CD28 on target cells and/or CD28 on T cells. According to particular embodiments, the methods for characterizing antibodies and antigen-binding fragments thereof that bind Vβ17, a cancer antigen, and/or CD28 include those described below.

[0358] Also provided is a method of directing Vβ17-expressing T cells to a target cell. Also provided is a method of directing CD28-expressing T cells to a target cell. Also provided is a method of directing Vβ17-expressing and CD28-expressing T cells to a target cell. The methods can comprise contacting the Vβ17-expressing and/or CD28-expressing T cell with a Vβ17×CD28 trispecific antibody or antigen binding fragment thereof provided herein, wherein the Vβ17×CD28 trispecific antibody or antigen binding fragment thereof directs the T cell to the target cell.

[0359] Also provided is a method for inhibiting growth or proliferation of target cells. The methods can comprise contacting the Vβ17-expressing T cells with a Vβ17×CD28 trispecific antibody or antigen binding fragment thereof provided herein, wherein contacting the target cells with the Vβ17×CD28 trispecific antibody or antigen binding fragment thereof composition inhibits the growth or proliferation of the target cells. The methods can comprise contacting the CD28-expressing T cells with a Vβ17×CD28 trispecific antibody or antigen binding fragment thereof provided herein, wherein contacting the target cells with the Vβ17×CD28 trispecific antibody or antigen binding fragment thereof composition inhibits the growth or proliferation of the target cells. The methods can comprise contacting the Vβ17-expressing and/or CD28-expressing T cells with a Vβ17×CD28 trispecific antibody or antigen binding fragment thereof provided herein, wherein contacting the target cells with the Vβ17×CD28 trispecific antibody or antigen binding fragment thereof composition inhibits the growth or proliferation of the target cells.

[0360] In another aspect, provided herein is a method for eliminating target cells in a subject, comprising administering an effective amount of a trispecific antibody, as provided herein, to the subject.

[0361] In another general aspect, the invention relates to a method of treating a disease or disorder in a subject in need thereof, comprising administering to the subject a trispecific antibody or antigen binding fragment thereof, or a pharmaceutical composition disclosed herein. In some embodiments, provided is a method for eliminating target cells expressing a cancer antigen or treating a disease caused all or in part by target cells expressing a cancer antigen in a subject, comprising administering an effective amount of a trispecific antibody provided herein to the subject. In some embodiments, the subject is a subject in need thereof. In some embodiments, the subject is a human. In specific embodiments, the trispecific antibody binds Vβ17, CD28 and a cancer antigen.

[0362] According to embodiments provided herein, the pharmaceutical composition comprises an effective amount of Vβ17×CD28 trispecific antibody or antigen-binding fragment thereof provided herein.

[0363] In one embodiment, the Vβ17×CD28 trispecific antibody further binds a cancer antigen. In certain embodiments, the cancer antigen is a TAA. In some embodiments, the cancer antigen is BCMA. In some embodiments, the cancer antigen is PSMA. In some embodiments, the target cell is a cancer cell. In some embodiments, the target cell is a B cell. In some embodiments, the target cell is a B cell cancer cell. In some embodiments, the target cell is a prostate cell. In some embodiments, the target cell is a prostate cancer cell.

[0364] In some embodiments, the cancer cell is a cell of an adrenal cancer, anal cancer, appendix cancer, bile duct cancer, bladder cancer, bone cancer, brain cancer, breast cancer, cervical cancer, colorectal cancer, esophageal cancer, gallbladder cancer, gestational trophoblastic, head and neck cancer, Hodgkin lymphoma, intestinal cancer, kidney cancer, leukemia, liver cancer, lung cancer, melanoma, mesothelioma, multiple myeloma, neuroendocrine tumor, non-Hodgkin lymphoma, oral cancer, ovarian cancer, pancreatic cancer, prostate cancer, sinus cancer, skin cancer, soft tissue sarcoma spinal cancer, stomach cancer, testicular cancer, throat cancer, thyroid cancer, uterine cancer endometrial cancer, vaginal cancer, or vulvar cancer. In some embodiments, the cancer is an adrenal cancer, anal cancer, appendix cancer, bile duct cancer, bladder cancer, bone cancer, brain cancer, breast cancer, cervical cancer, colorectal cancer, esophageal cancer, gallbladder cancer, gestational trophoblastic, head and neck cancer, Hodgkin lymphoma, intestinal cancer, kidney cancer, leukemia, liver cancer, lung cancer, melanoma, mesothelioma, multiple myeloma, neuroendocrine tumor, non-Hodgkin lymphoma, oral cancer, ovarian cancer, pancreatic cancer, prostate cancer, sinus cancer, skin cancer, soft tissue sarcoma spinal cancer, stomach cancer, testicular cancer, throat cancer, thyroid cancer, uterine cancer endometrial cancer, vaginal cancer, or vulvar cancer. In some embodiments, the cancer is a adrenal cancer. In some embodiments, the cancer is a anal cancer. In some embodiments, the cancer is an appendix cancer. In some embodiments, the cancer is a bile duct cancer. In some embodiments, the cancer is a bladder cancer. In some embodiments, the cancer is a bone cancer. In some embodiments, the cancer is a brain cancer. In some embodiments, the cancer is a breast cancer. In some embodiments, the cancer is a cervical cancer. In some embodiments, the cancer is a colorectal cancer. In some embodiments, the cancer is a esophageal cancer. In some embodiments, the cancer is a gallbladder cancer. In some embodiments, the cancer is a gestational trophoblastic. In some embodiments, the cancer is a head and neck cancer. In some embodiments, the cancer is a Hodgkin lymphoma. In some embodiments, the cancer is an intestinal cancer. In some embodiments, the cancer is a kidney cancer. In some embodiments, the cancer is a leukemia. In some embodiments, the cancer is a liver cancer. In some embodiments, the cancer is a lung cancer. In some embodiments, the cancer is a melanoma. In some embodiments, the cancer is a mesothelioma. In some embodiments, the cancer is a multiple myeloma. In some embodiments, the cancer is a neuroendocrine tumor. In some embodiments, the cancer is a non-Hodgkin lymphoma. In some embodiments, the cancer is an oral cancer. In some embodiments, the cancer is a ovarian cancer. In some embodiments, the cancer is a pancreatic cancer. In some embodiments, the cancer is a prostate cancer. In some embodiments, the cancer is a sinus cancer. In some embodiments, the cancer is a skin cancer. In some embodiments, the cancer is a soft tissue sarcoma spinal cancer. In some embodiments, the cancer is a stomach cancer. In some embodiments, the cancer is a testicular cancer. In some embodiments, the cancer is a throat cancer. In some embodiments, the cancer is a thyroid cancer. In some embodiments, the cancer is a uterine cancer endometrial cancer. In some embodiments, the cancer is a vaginal cancer. In some embodiments, the cancer is a vulvar cancer.

[0365] In some embodiments, the adrenal cancer is an adrenocortical carcinoma (ACC), adrenal cortex cancer, pheochromocytoma, or neuroblastoma. In some embodiments, the anal cancer is a squamous cell carcinoma, cloacogenic carcinoma, adenocarcinoma, basal cell carcinoma, or melanoma. In some embodiments, the appendix cancer is a neuroendocrine tumor (NET), mucinous adenocarcinoma, goblet cell carcinoid, intestinal-type adenocarcinoma, or signet-ring cell adenocarcinoma. In some embodiments, the bile duct cancer is an extrahepatic bile duct cancer, adenocarcinomas, hilar bile duct cancer, perihilar bile duct cancer, distal bile duct cancer, or intrahepatic bile duct cancer. In some embodiments, the bladder cancer is transitional cell carcinoma (TCC), papillary carcinoma, flat carcinoma, squamous cell carcinoma, adenocarcinoma, small-cell carcinoma, or sarcoma. In some embodiments, the bone cancer is a primary bone cancer, sarcoma, osteosarcoma, chondrosarcoma, sarcoma, fibrosarcoma, malignant fibrous histiocytoma, giant cell tumor of bone, chordoma, or metastatic bone cancer. In some embodiments, the brain cancer is an astrocytoma, brain stem glioma, glioblastoma, meningioma, ependymoma, oligodendroglioma, mixed glioma, pituitary carcinoma, pituitary adenoma, craniopharyngioma, germ cell tumor, pineal region tumor, medulloblastoma, or primary CNS lymphoma. In some embodiments, the breast cancer is a breast adenocarcinoma, invasive breast cancer, noninvasive breast cancer, breast sarcoma, metaplastic carcinoma, adenocystic carcinoma, phyllodes tumor, angiosarcoma, HER2-positive breast cancer, triple-negative breast cancer, or inflammatory breast cancer. In some embodiments, the cervical cancer is a squamous cell carcinoma, or adenocarcinoma. In some embodiments, the colorectal cancer is a colorectal adenocarcinoma, primary colorectal lymphoma, gastrointestinal stromal tumor, leiomyosarcoma, carcinoid tumor, mucinous adenocarcinoma, signet ring cell adenocarcinoma, gastrointestinal carcinoid tumor, or melanoma. In some embodiments, the esophageal cancer is an adenocarcinoma or squamous cell carcinoma. In some embodiments, the gall bladder cancer is an adenocarcinoma, papillary adenocarcinoma, adenosquamous carcinoma, squamous cell carcinoma, small cell carcinoma, or sarcoma. In some embodiments, the gestational trophoblastic disease (GTD) is a hydatidiform mole, gestational trophoblastic neoplasia (GTN), choriocarcinoma, placental-site trophoblastic tumor (PSTT), or epithelioid trophoblastic tumor (ETT). In some embodiments, the head and neck cancer is a laryngeal cancer, nasopharyngeal cancer, hypopharyngeal cancer, nasal cavity cancer, paranasal sinus cancer, salivary gland cancer, oral cancer, oropharyngeal cancer, or tonsil cancer. In some embodiments, the Hodgkin lymphoma is a classical Hodgkin lymphoma, nodular sclerosis, mixed cellularity, lymphocyte-rich, lymphocyte-depleted, or nodular lymphocyte-predominant Hodgkin lymphoma (NLPHL). In some embodiments, the intestinal cancer is a small intestine cancer, small bowel cancer, adenocarcinoma, sarcoma, gastrointestinal stromal tumors, carcinoid tumors, or lymphoma. In some embodiments, the kidney cancer is a renal cell carcinoma (RCC), clear cell RCC, papillary RCC, chromophobe RCC, collecting duct RCC, unclassified RCC, transitional cell carcinoma, urothelial cancer, renal pelvis carcinoma, or renal sarcoma. In some embodiments, the leukemia is an acute lymphocytic leukemia (ALL), acute myeloid leukemia (AML), chronic lymphocytic leukemia (CLL), chronic myeloid leukemia (CML), hairy cell leukemia (HCL), or a myelodysplastic syndrome (MDS). In a specific embodiment, the leukemia is AML. In some embodiments, the liver cancer is a hepatocellular carcinoma (HCC), fibrolamellar HCC, cholangiocarcinoma, angiosarcoma, or liver metastasis. In some embodiments, the lung cancer is a small cell lung cancer, small cell carcinoma, combined small cell carcinoma, non-small cell lung cancer, lung adenocarcinoma, squamous cell lung cancer, large-cell undifferentiated carcinoma, pulmonary nodule, metastatic lung cancer, adenosquamous carcinoma, large cell neuroendocrine carcinoma, salivary gland-type lung carcinoma, lung carcinoid, mesothelioma, sarcomatoid carcinoma of the lung, or malignant granular cell lung tumor. In some embodiments, the melanoma is a superficial spreading melanoma, nodular melanoma, acral-lentiginous melanoma, lentigo maligna melanoma, amelanotic melanoma, desmoplastic melanoma, ocular melanoma, or metastatic melanoma. In some embodiments, the mesothelioma is a pleural mesothelioma, peritoneal mesothelioma, pericardial mesothelioma, or testicular mesothelioma. In some embodiments, the multiple myeloma is an active myeloma or smoldering myeloma. In some embodiments, the neuroendocrine tumor, is a gastrointestinal neuroendocrine tumor, pancreatic neuroendocrine tumor, or lung neuroendocrine tumor. In some embodiments, the non-Hodgkin's lymphoma is an anaplastic large-cell lymphoma, lymphoblastic lymphoma, peripheral T cell lymphoma, follicular lymphoma, cutaneous T cell lymphoma, lymphoplasmacytic lymphoma, marginal zone B-cell lymphoma, MALT lymphoma, small-cell lymphocytic lymphoma, Burkitt lymphoma, chronic lymphocytic leukemia (CLL), small lymphocytic lymphoma (SLL), precursor T-lymphoblastic leukemia/lymphoma, acute lymphocytic leukemia (ALL), adult T cell lymphoma/leukemia (ATLL), hairy cell leukemia, B-cell lymphomas, diffuse large B-cell lymphoma (DLBCL), primary mediastinal B-cell lymphoma, primary central nervous system (CNS) lymphoma, mantle cell lymphoma (MCL), marginal zone lymphomas, mucosa-associated lymphoid tissue (MALT) lymphoma, nodal marginal zone B-cell lymphoma, splenic marginal zone B-cell lymphoma, lymphoplasmacytic lymphoma, B-cell non-Hodgkin lymphoma, T cell non-Hodgkin lymphoma, natural killer cell lymphoma, cutaneous T cell lymphoma, Alibert-Bazin syndrome, Sezary syndrome, primary cutaneous anaplastic large-cell lymphoma, peripheral T cell lymphoma, angioimmunoblastic T cell lymphoma (AITL), anaplastic large-cell lymphoma (ALCL), systemic ALCL, enteropathy-type T cell lymphoma (EATL), or hepatosplenic gamma/delta T cell lymphoma. In some embodiments, the oral cancer is a squamous cell carcinoma, verrucous carcinoma, minor salivary gland carcinomas, lymphoma, benign oral cavity tumor, eosinophilic granuloma, fibroma, granular cell tumor, karatoacanthoma, leiomyoma, osteochondroma, lipoma, schwannoma, neurofibroma, papilloma, condyloma acuminatum, verruciform xanthoma, pyogenic granuloma, rhabdomyoma, odontogenic tumors, leukoplakia, erythroplakia, squamous cell lip cancer, basal cell lip cancer, mouth cancer, gum cancer, or tongue cancer. In some embodiments, the ovarian cancer is a ovarian epithelial cancer, mucinous epithelial ovarian cancer, endometrioid epithelial ovarian cancer, clear cell epithelial ovarian cancer, undifferentiated epithelial ovarian cancer, ovarian low malignant potential tumors, primary peritoneal carcinoma, fallopian tube cancer, germ cell tumors, teratoma, dysgerminoma ovarian germ cell cancer, endodermal sinus tumor, sex cord-stromal tumors, sex cord-gonadal stromal tumor, ovarian stromal tumor, granulosa cell tumor, granulosa-theca tumor, Sertoli-Leydig tumor, ovarian sarcoma, ovarian carcinosarcoma, ovarian adenosarcoma, ovarian leiomyosarcoma, ovarian fibrosarcoma, Krukenberg tumor, or ovarian cyst. In some embodiments, the pancreatic cancer is a pancreatic exocrine gland cancer, pancreatic endocrine gland cancer, or pancreatic adenocarcinoma, islet cell tumor, or neuroendocrine tumor. In some embodiments, the prostate cancer is a prostate adenocarcinoma, prostate sarcoma, transitional cell carcinoma, small cell carcinoma, or neuroendocrine tumor. In some embodiments, the sinus cancer is a squamous cell carcinoma, mucosa cell carcinoma, adenoid cystic cell carcinoma, acinic cell carcinoma, sinonasal undifferentiated carcinoma, nasal cavity cancer, paranasal sinus cancer, maxillary sinus cancer, ethmoid sinus cancer, or nasopharynx cancer. In some embodiments, the skin cancer is a basal cell carcinoma, squamous cell carcinoma, melanoma, Merkel cell carcinoma, Kaposi sarcoma (KS), actinic keratosis, skin lymphoma, or keratoacanthoma. In some embodiments, the soft tissue cancer is an angiosarcoma, dermatofibrosarcoma, epithelioid sarcoma, Ewing's sarcoma, fibrosarcoma, gastrointestinal stromal tumors (GISTs), Kaposi sarcoma, leiomyosarcoma, liposarcoma, dedifferentiated liposarcoma (DL), myxoid/round cell liposarcoma (MRCL), well-differentiated liposarcoma (WDL), malignant fibrous histiocytoma, neurofibrosarcoma, rhabdomyosarcoma (RMS), or synovial sarcoma. In some embodiments, the spinal cancer is a spinal metastatic tumor. In some embodiments, the stomach cancer is a stomach adenocarcinoma, stomach lymphoma, gastrointestinal stromal tumors, carcinoid tumor, gastric carcinoid tumors, Type I ECL-cell carcinoid, Type II ECL-cell carcinoid, or Type III ECL-cell carcinoid. In some embodiments, the testicular cancer is a seminoma, non-seminoma, embryonal carcinoma, yolk sac carcinoma, choriocarcinoma, teratoma, gonadal stromal tumor, leydig cell tumor, or sertoli cell tumor. In some embodiments, the throat cancer is a squamous cell carcinoma, adenocarcinoma, sarcoma, laryngeal cancer, pharyngeal cancer, nasopharynx cancer, oropharynx cancer, hypopharynx cancer, laryngeal cancer, laryngeal squamous cell carcinoma, laryngeal adenocarcinoma, lymphoepithelioma, spindle cell carcinoma, verrucous cancer, undifferentiated carcinoma, or lymph node cancer. In some embodiments, the thyroid cancer is a papillary carcinoma, follicular carcinoma, Hürthle cell carcinoma, medullary thyroid carcinoma, or anaplastic carcinoma. In some embodiments, the uterine cancer is an endometrial cancer, endometrial adenocarcinoma, endometroid carcinoma, serous adenocarcinoma, adenosquamous carcinoma, uterine carcinosarcoma, uterine sarcoma, uterine leiomyosarcoma, endometrial stromal sarcoma, or undifferentiated sarcoma. In some embodiments, the vaginal cancer is a squamous cell carcinoma, adenocarcinoma, melanoma, or sarcoma. In some embodiments, the vulvar cancer is a squamous cell carcinoma or adenocarcinoma.

[0366] In some embodiments, the cancer antigen is angiopoietin, BCMA, CD19, CD20, CD22, CD25 (IL2-R), CD30, CD33, CD37, CD38, CD52, CD56, CD123 (IL-3R), cMET, DLL/Notch, EGFR, EpCAM, FGF, FGF-R, GD2, HER2, Mesothelin, Nectin-4, PDGFRα, RANKL, SLAMF7, TROP2, VEGF, or VEGF-R. In some embodiments, the cancer antigen is angiopoietin. In some embodiments, the cancer antigen is BCMA. In some embodiments, the cancer antigen is CD19. In some embodiments, the cancer antigen is CD20. In some embodiments, the cancer antigen is CD22. In some embodiments, the cancer antigen is CD25 (IL2-R). In some embodiments, the cancer antigen is CD30. In some embodiments, the cancer antigen is CD33. In some embodiments, the cancer antigen is CD37. In some embodiments, the cancer antigen is CD38. In some embodiments, the cancer antigen is CD52. In some embodiments, the cancer antigen is CD56. In some embodiments, the cancer antigen is CD123 (IL-3R). In some embodiments, the cancer antigen is cMET. In some embodiments, the cancer antigen is DLL/Notch. In some embodiments, the cancer antigen is EGFR. In some embodiments, the cancer antigen is EpCAM. In some embodiments, the cancer antigen is FGF. In some embodiments, the cancer antigen is FGF-R. In some embodiments, the cancer antigen is GD2. In some embodiments, the cancer antigen is HER2. In some embodiments, the cancer antigen is Mesothelin. In some embodiments, the cancer antigen is Nectin-4. In some embodiments, the cancer antigen is PDGFRα. In some embodiments, the cancer antigen is RANKL. In some embodiments, the cancer antigen is SLAMF7. In some embodiments, the cancer antigen is TROP2. In some embodiments, the cancer antigen is VEGF. In some embodiments, the cancer antigen is VEGF-R. In some embodiments, the cancer antigen is PSMA. In some embodiments, the cancer antigen is KLK2.

[0367] In some embodiments, the cancer antigen is CEA, immature laminin receptor, TAG-72, HPV E6, HPV E7, BING-4, calcium-activated chloride channel 2, cyclin-B1, 9D7, EpCAM, EphA3, Her2/neu, telomerase, mesothelin, SAP-1, surviving, a BAGE family antigen, CAGE family antigen, GAGE family antigen, MAGE family antigen, SAGE family antigen, XAGE family antigen, NY-ESO-1/LAGE-1, PRAME, SSX-2, Melan-A, MART-1, Gp100, pmel17, tyrosinase, TRP-1, TRP-2, P. polypeptide, MC1R, prostate-specific antigen, β-catenin, BRCA1, BRCA2, CDK4, CML66, fibronectin, MART-2, p53, Ras, TGF-βRII, or MUC1. In some embodiments, the cancer antigen is CEA. In some embodiments, the cancer antigen is immature laminin receptor. In some embodiments, the cancer antigen is TAG-72. In some embodiments, the cancer antigen is HPV E6. In some embodiments, the cancer antigen is HPV E7. In some embodiments, the cancer antigen is BING-4. In some embodiments, the cancer antigen is calcium-activated chloride channel 2. In some embodiments, the cancer antigen is cyclin-B1. In some embodiments, the cancer antigen is 9D7. In some embodiments, the cancer antigen is EpCAM. In some embodiments, the cancer antigen is EphA3. In some embodiments, the cancer antigen is Her2/neu. In some embodiments, the cancer antigen is telomerase. In some embodiments, the cancer antigen is mesothelin. In some embodiments, the cancer antigen is SAP-1. In some embodiments, the cancer antigen is surviving. In some embodiments, the cancer antigen is a BAGE family antigen. In some embodiments, the cancer antigen is CAGE family antigen. In some embodiments, the cancer antigen is GAGE family antigen. In some embodiments, the cancer antigen is MAGE family antigen. In some embodiments, the cancer antigen is SAGE family antigen. In some embodiments, the cancer antigen is XAGE family antigen. In some embodiments, the cancer antigen is NY-ESO-1/LAGE-1. In some embodiments, the cancer antigen is PRAME. In some embodiments, the cancer antigen is SSX-2. In some embodiments, the cancer antigen is Melan-A. In some embodiments, the cancer antigen is MART-1. In some embodiments, the cancer antigen is Gp100. In some embodiments, the cancer antigen is pmel17. In some embodiments, the cancer antigen is tyrosinase. In some embodiments, the cancer antigen is TRP-1. In some embodiments, the cancer antigen is TRP-2. In some embodiments, the cancer antigen is P. polypeptide. In some embodiments, the cancer antigen is MC1R. In some embodiments, the cancer antigen is prostate-specific antigen. In some embodiments, the cancer antigen is β-catenin. In some embodiments, the cancer antigen is BRCA1. In some embodiments, the cancer antigen is BRCA2. In some embodiments, the cancer antigen is CDK4. In some embodiments, the cancer antigen is CML66. In some embodiments, the cancer antigen is fibronectin. In some embodiments, the cancer antigen is MART-2. In some embodiments, the cancer antigen is p53. In some embodiments, the cancer antigen is Ras. In some embodiments, the cancer antigen is TGF-βRII. In some embodiments, the cancer antigen is MUC1.

[0368] Also provided is a trispecific antibody provided herein for use in therapy. Also provided is a trispecific antibody provided herein for use in a method of treating a cancer in a subject. In some embodiments, the cancer is a leukemia. In some embodiments, the cancer is a lymphoma. In certain embodiments, the subject is a subject in need thereof. In a specific embodiment, the subject is a human.

[0369] According to embodiments of the invention, the described Vβ17×CD28 trispecific antibody or antigen-binding fragment thereof can be provided in a buffered composition for storage or use. Suitable buffers for the storage of the described Vβ17×CD28 trispecific antibody or antigen-binding fragment thereof would serve to maintain the stability of the antibody or antibody fragment by minimizing deterioration while stored, not promoting aggregation of the antibody or antibody fragment, or minimizing adhesion to the storage vessel.

[0370] In another aspect, provided herein is a method of directing a T cell expressing Vβ17 to a cancer cell, the method comprising contacting the T cell with a trispecific antibody provided herein. In some embodiments, the contacting directs the T cell to the cancer cell. In another aspect, provided herein is a method of directing a T cell expressing CD28 to a cancer cell, the method comprising contacting the T cell with a trispecific antibody provided herein. In some embodiments, the contacting directs the T cell to the cancer cell. In another aspect, provided herein is a method of directing a T cell expressing Vβ17 and CD28 to a cancer cell, the method comprising contacting the T cell with a trispecific antibody provided herein. In some embodiments, the contacting directs the T cell to the cancer cell. In specific embodiments, the cancer cell is a cell of a cancer provided herein.

[0371] Also provided is a method of targeting cancer antigen on the surface of a cancer cell, the method comprising exposing the cancer cell to an anti-Vβ17/anti-cancer antigen/anti-CD28 trispecific antibody or antigen binding fragment thereof provided herein. Also provided is a method of targeting an antigen on the surface of a cancer cell, the method comprising exposing the cancer cell to a pharmaceutical composition comprising an anti-Vβ17/anti-cancer antigen/anti-CD28 trispecific antibody or antigen binding fragment thereof provided herein.

[0372] The functional activity of trispecific antibodies and antigen-binding fragments thereof that bind Vβ17, cancer antigen and/or CD28 can be characterized by methods known in the art and as described herein. Methods for characterizing antibodies and antigen-binding fragments thereof that bind Vβ17, a cancer antigen and/or CD28 include, but are not limited to, affinity and specificity assays including Biacore, ELISA, and OctetRed analysis; binding assays to detect the binding of antibodies to target cells by FACS; binding assays to detect the binding of antibodies to Vβ17 on T cells, cancer antigen on cancer cells, CD28 on cancer cells and/or CD28 on T cells. According to particular embodiments, the methods for characterizing antibodies and antigen-binding fragments thereof that bind Vβ17, an antigen, and/or CD28 include those described below.

[0373] Also provided is a method of directing Vβ17-expressing T cells to a cancer cell. Also provided is a method of directing CD28-expressing T cells to a cancer cell. Also provided is a method of directing Vβ17-expressing and CD28-expressing T cells to a cancer cell. The methods can comprise contacting the Vβ17-expressing and/or CD28-expressing T cell with an anti-Vβ17/anti-cancer antigen/anti-CD28 trispecific antibody or antigen binding fragment thereof provided herein, wherein the anti-Vβ17/anti-cancer antigen/anti-CD28 trispecific antibody or antigen binding fragment thereof directs the T cell to the cancer cell.

[0374] Also provided is a method for inhibiting growth or proliferation of cancer cells. The methods can comprise contacting the Vβ17-expressing T cells with an anti-Vβ17/anti-cancer antigen/anti-CD28 trispecific antibody or antigen binding fragment thereof provided herein, wherein contacting the cancer cells with the anti-Vβ17/anti-cancer antigen/anti-CD28 trispecific antibody or antigen binding fragment thereof composition inhibits the growth or proliferation of the cancer cells. The methods can comprise contacting the CD28-expressing T cells with an anti-Vβ17/anti-cancer antigen/anti-CD28 trispecific antibody or antigen binding fragment thereof provided herein, wherein contacting the cancer cells with the anti-Vβ17/anti-cancer antigen/anti-CD28 trispecific antibody or antigen binding fragment thereof composition inhibits the growth or proliferation of the cancer cells. The methods can comprise contacting the Vβ17-expressing and/or CD28-expressing T cells with an anti-Vβ17/anti-cancer antigen/anti-CD28 trispecific antibody or antigen binding fragment thereof provided herein, wherein contacting the cancer cells with the anti-Vβ17/anti-cancer antigen/anti-CD28 trispecific antibody or antigen binding fragment thereof composition inhibits the growth or proliferation of the cancer cells.

[0375] In another aspect, provided herein is a method for eliminating cancer cells in a subject, comprising administering an effective amount of a trispecific antibody, as provided herein, to the subject.

[0376] In another general aspect, the invention relates to a method of treating a disease or disorder in a subject in need thereof, comprising administering to the subject an isolated trispecific antibody or antigen binding fragment thereof, or a pharmaceutical composition disclosed herein. In some embodiments, provided is a method for eliminating cancer cells expressing a cancer antigen or treating a disease caused all or in part by cancer cells expressing a cancer antigen in a subject, comprising administering an effective amount of a trispecific antibody provided herein to the subject. In some embodiments, the subject is a subject in need thereof. In some embodiments, the subject is a human. In specific embodiments, the trispecific antibody binds Vβ17, CD28 and a cancer antigen.

[0377] According to embodiments provided herein, the pharmaceutical composition comprises an effective amount of anti-Vβ17/anti-cancer antigen/anti-CD28 trispecific antibody or antigen-binding fragment thereof provided herein.

[0378] According to embodiments of the invention, the described anti-Vβ17/anti-cancer antigen/anti-CD28 trispecific antibody or antigen-binding fragment thereof can be provided in a buffered composition for storage or use. Suitable buffers for the storage of the described anti-Vβ17/anti-cancer antigen/anti-CD28 trispecific antibody or antigen-binding fragment thereof would serve to maintain the stability of the antibody or antibody fragment by minimizing deterioration while stored, not promoting aggregation of the antibody or antibody fragment, or minimizing adhesion to the storage vessel.

[0379] In certain embodiments, the cancer antigen is a tumor associate antigen. In certain embodiments, the cancer antigen is a tumor specific antigen. In certain embodiments, the cancer antigen is a neoantigen. In certain embodiments, the cancer antigen is a B cell cancer antigen. In certain embodiments, the cancer antigen is a BCMA. In certain embodiments, the cancer antigen is a prostate cancer antigen. In certain embodiments, the cancer antigen is PSMA.

[0380] In another aspect, provided herein is a method of directing a T cell expressing Vβ17 to a B cell, the method comprising contacting the T cell with a trispecific antibody provided herein. In some embodiments, the contacting directs the T cell to the B cell. In another aspect, provided herein is a method of directing a T cell expressing CD28 to a B cell, the method comprising contacting the T cell with a trispecific antibody provided herein. In some embodiments, the contacting directs the T cell to the B cell. In another aspect, provided herein is a method of directing a T cell expressing Vβ17 and CD28 to a B cell, the method comprising contacting the T cell with a trispecific antibody provided herein. In some embodiments, the contacting directs the T cell to the B cell.

[0381] Also provided is a method of targeting BCMA on the surface of a B cell, the method comprising exposing the B cell to an anti-Vβ17/anti-BCMA/anti-CD28 trispecific antibody or antigen binding fragment thereof provided herein. Also provided is a method of targeting an antigen on the surface of a B cell, the method comprising exposing the B cell to a pharmaceutical composition comprising an anti-Vβ17/anti-BCMA/anti-CD28 trispecific antibody or antigen binding fragment thereof provided herein.

[0382] Also provided is a method of targeting CD28 on the surface of a B cell, the method comprising exposing the B cell to an anti-Vβ17/anti-BCMA/anti-CD28 trispecific antibody or antigen binding fragment thereof provided herein. Also provided is a method of targeting an antigen on the surface of a B cell, the method comprising exposing the B cell to a pharmaceutical composition comprising an anti-Vβ17/anti-BCMA/anti-CD28 trispecific antibody or antigen binding fragment thereof provided herein.

[0383] The functional activity of trispecific antibodies and antigen-binding fragments thereof that bind Vβ17, BCMA and/or CD28 can be characterized by methods known in the art and as described herein. Methods for characterizing antibodies and antigen-binding fragments thereof that bind Vβ17, BCMA and/or CD28 include, but are not limited to, affinity and specificity assays including Biacore, ELISA, and OctetRed analysis; binding assays to detect the binding of antibodies to target cells by FACS; binding assays to detect the binding of antibodies to Vβ17 on T cells, BCMA on B cells, CD28 on B cells and/or CD28 on T cells. According to particular embodiments, the methods for characterizing antibodies and antigen-binding fragments thereof that bind Vβ17, BCMA, and/or CD28 include those described below.

[0384] Also provided is a method of directing Vβ17-expressing T cells to a B cell. Also provided is a method of directing CD28-expressing T cells to a B cell. Also provided is a method of directing Vβ17-expressing and CD28-expressing T cells to a B cell. The methods can comprise contacting the Vβ17-expressing and/or CD28-expressing T cell with an anti-Vβ17/anti-BCMA/anti-CD28 trispecific antibody or antigen binding fragment thereof provided herein, wherein the anti-Vβ17/anti-BCMA/anti-CD28 trispecific antibody or antigen binding fragment thereof directs the T cell to the B cell.

[0385] Also provided is a method for inhibiting growth or proliferation of B cells. The methods can comprise contacting the Vβ17-expressing T cells with an anti-Vβ17/anti-BCMA/anti-CD28 trispecific antibody or antigen binding fragment thereof provided herein, wherein contacting the B cells with the anti-Vβ17/anti-BCMA/anti-CD28 trispecific antibody or antigen binding fragment thereof composition inhibits the growth or proliferation of the B cells. The methods can comprise contacting the CD28-expressing T cells with an anti-Vβ17/anti-BCMA/anti-CD28 trispecific antibody or antigen binding fragment thereof provided herein, wherein contacting the B cells with the anti-Vβ17/anti-BCMA/anti-CD28 trispecific antibody or antigen binding fragment thereof composition inhibits the growth or proliferation of the B cells. The methods can comprise contacting the Vβ17-expressing and/or CD28-expressing T cells with an anti-Vβ17/anti-BCMA/anti-CD28 trispecific antibody or antigen binding fragment thereof provided herein, wherein contacting the B cells with the anti-Vβ17/anti-BCMA/anti-CD28 trispecific antibody or antigen binding fragment thereof composition inhibits the growth or proliferation of the B cells.

[0386] In another aspect, provided herein is a method for eliminating B cells in a subject, comprising administering an effective amount of a trispecific antibody, as provided herein, to the subject.

[0387] In another general aspect, the invention relates to a method of treating a disease or disorder in a subject in need thereof, comprising administering to the subject an isolated trispecific antibody or antigen binding fragment thereof, or a pharmaceutical composition disclosed herein. In some embodiments, provided is a method for eliminating B cells expressing BCMA or treating a disease caused all or in part by B cells expressing BCMA in a subject, comprising administering an effective amount of a trispecific antibody provided herein to the subject. In some embodiments, provided is a method for eliminating B cells expressing CD28 or treating a disease caused all or in part by B cells expressing CD28 in a subject, comprising administering an effective amount of a trispecific antibody provided herein to the subject. In some embodiments, the subject is a subject in need thereof. In some embodiments, the subject is a human. In specific embodiments, the trispecific antibody binds Vβ17, CD28 and BCMA.

[0388] According to embodiments provided herein, the pharmaceutical composition comprises an effective amount of anti-Vβ17/anti-BCMA/anti-CD28 trispecific antibody or antigen-binding fragment thereof provided herein.

[0389] According to embodiments of the invention, the described anti-Vβ17/anti-BCMA/anti-CD28 trispecific antibody or antigen-binding fragment thereof can be provided in a buffered composition for storage or use. Suitable buffers for the storage of the described anti-Vβ17/anti-BCMA/anti-CD28 trispecific antibody or antigen-binding fragment thereof would serve to maintain the stability of the antibody or antibody fragment by minimizing deterioration while stored, not promoting aggregation of the antibody or antibody fragment, or minimizing adhesion to the storage vessel.

[0390] In another aspect, provided herein is a method of directing a T cell expressing Vβ17 to a prostate cell, the method comprising contacting the T cell with a trispecific antibody provided herein. In some embodiments, the contacting directs the T cell to the prostate cell. In another aspect, provided herein is a method of directing a T cell expressing CD28 to a prostate cell, the method comprising contacting the T cell with a trispecific antibody provided herein. In some embodiments, the contacting directs the T cell to the prostate cell. In another aspect, provided herein is a method of directing a T cell expressing Vβ17 and CD28 to a prostate cell, the method comprising contacting the T cell with a trispecific antibody provided herein. In some embodiments, the contacting directs the T cell to the prostate cell. In specific embodiments, the prostate cell is a prostate cancer cell. other PSMA-expressing cells are also contemplated.

[0391] Also provided is a method of targeting PSMA on the surface of a prostate cell, the method comprising exposing the prostate cell to an anti-Vβ17/anti-PSMA/anti-CD28 trispecific antibody or antigen binding fragment thereof provided herein. Also provided is a method of targeting an antigen on the surface of a prostate cell, the method comprising exposing the prostate cell to a pharmaceutical composition comprising an anti-Vβ17/anti-PSMA/anti-CD28 trispecific antibody or antigen binding fragment thereof provided herein.

[0392] The functional activity of trispecific antibodies and antigen-binding fragments thereof that bind Vβ17, PSMA and/or CD28 can be characterized by methods known in the art and as described herein. Methods for characterizing antibodies and antigen-binding fragments thereof that bind Vβ17, PSMA and/or CD28 include, but are not limited to, affinity and specificity assays including Biacore, ELISA, and OctetRed analysis; binding assays to detect the binding of antibodies to target cells by FACS; binding assays to detect the binding of antibodies to Vβ17 on T cells, PSMA on prostate cells, CD28 on prostate cells and/or CD28 on T cells. According to particular embodiments, the methods for characterizing antibodies and antigen-binding fragments thereof that bind Vβ17, PSMA, and/or CD28 include those described below.

[0393] Also provided is a method of directing Vβ17-expressing T cells to a prostate cell. Also provided is a method of directing CD28-expressing T cells to a prostate cell. Also provided is a method of directing Vβ17-expressing and CD28-expressing T cells to a prostate cell. The methods can comprise contacting the Vβ17-expressing and/or CD28-expressing T cell with an anti-Vβ17/anti-PSMA/anti-CD28 trispecific antibody or antigen binding fragment thereof provided herein, wherein the anti-Vβ17/anti-PSMA/anti-CD28 trispecific antibody or antigen binding fragment thereof directs the T cell to the prostate cell.

[0394] Also provided is a method for inhibiting growth or proliferation of prostate cells. The methods can comprise contacting the Vβ17-expressing T cells with an anti-Vβ17/anti-PSMA/anti-CD28 trispecific antibody or antigen binding fragment thereof provided herein, wherein contacting the prostate cells with the anti-Vβ17/anti-PSMA/anti-CD28 trispecific antibody or antigen binding fragment thereof composition inhibits the growth or proliferation of the prostate cells. The methods can comprise contacting the CD28-expressing T cells with an anti-Vβ17/anti-PSMA/anti-CD28 trispecific antibody or antigen binding fragment thereof provided herein, wherein contacting the prostate cells with the anti-Vβ17/anti-PSMA/anti-CD28 trispecific antibody or antigen binding fragment thereof composition inhibits the growth or proliferation of the prostate cells. The methods can comprise contacting the Vβ17-expressing and/or CD28-expressing T cells with an anti-Vβ17/anti-PSMA/anti-CD28 trispecific antibody or antigen binding fragment thereof provided herein, wherein contacting the prostate cells with the anti-Vβ17/anti-PSMA/anti-CD28 trispecific antibody or antigen binding fragment thereof composition inhibits the growth or proliferation of the prostate cells.

[0395] In another aspect, provided herein is a method for eliminating prostate cells in a subject, comprising administering an effective amount of a trispecific antibody, as provided herein, to the subject.

[0396] In another general aspect, the invention relates to a method of treating a disease or disorder in a subject in need thereof, comprising administering to the subject an isolated trispecific antibody or antigen binding fragment thereof, or a pharmaceutical composition disclosed herein. In some embodiments, provided is a method for eliminating prostate cells expressing PSMA or treating a disease caused all or in part by prostate cells expressing PSMA in a subject, comprising administering an effective amount of a trispecific antibody provided herein to the subject. In some embodiments, the subject is a subject in need thereof. In some embodiments, the subject is a human. In specific embodiments, the trispecific antibody binds Vβ17, CD28 and PSMA.

[0397] According to embodiments provided herein, the pharmaceutical composition comprises an effective amount of anti-Vβ17/anti-PSMA/anti-CD28 trispecific antibody or antigen-binding fragment thereof provided herein.

[0398] According to embodiments of the invention, the described anti-Vβ17/anti-PSMA/anti-CD28 trispecific antibody or antigen-binding fragment thereof can be provided in a buffered composition for storage or use. Suitable buffers for the storage of the described anti-Vβ17/anti-PSMA/anti-CD28 trispecific antibody or antigen-binding fragment thereof would serve to maintain the stability of the antibody or antibody fragment by minimizing deterioration while stored, not promoting aggregation of the antibody or antibody fragment, or minimizing adhesion to the storage vessel.

[0399] As used herein, the term “effective amount” refers to an amount of an active ingredient or component that elicits the desired biological or medicinal response in a subject.

[0400] According to particular embodiments, an effective amount refers to the amount of therapy which is sufficient to achieve one, two, three, four, or more of the following effects: (i) reduce or ameliorate the severity of the disease, disorder or condition to be treated or a symptom associated therewith; (ii) reduce the duration of the disease, disorder or condition to be treated, or a symptom associated therewith; (iii) prevent the progression of the disease, disorder or condition to be treated, or a symptom associated therewith; (iv) cause regression of the disease, disorder or condition to be treated, or a symptom associated therewith; (v) prevent the development or onset of the disease, disorder or condition to be treated, or a symptom associated therewith; (vi) prevent the recurrence of the disease, disorder or condition to be treated, or a symptom associated therewith; (vii) reduce hospitalization of a subject having the disease, disorder or condition to be treated, or a symptom associated therewith; (viii) reduce hospitalization length of a subject having the disease, disorder or condition to be treated, or a symptom associated therewith; (ix) increase the survival of a subject with the disease, disorder or condition to be treated, or a symptom associated therewith; (xi) inhibit or reduce the disease, disorder or condition to be treated, or a symptom associated therewith in a subject; and/or (xii) enhance or improve the prophylactic or therapeutic effect(s) of another therapy.

[0401] The effective amount or dosage can vary according to various factors, such as the disease, disorder or condition to be treated, the means of administration, the target site, the physiological state of the subject (including, e.g., age, body weight, health), whether the subject is a human or an animal, other medications administered, and whether the treatment is prophylactic or therapeutic. Treatment dosages are optimally titrated to optimize safety and efficacy.

[0402] According to particular embodiments, the compositions described herein are formulated to be suitable for the intended route of administration to a subject. For example, the compositions described herein can be formulated to be suitable for intravenous, subcutaneous, or intramuscular administration.

[0403] As used herein, the terms “treat,” “treating,” and “treatment” are all intended to refer to an amelioration or reversal of at least one measurable physical parameter related to a cancer, which is not necessarily discernible in the subject, but can be discernible in the subject. The terms “treat,” “treating,” and “treatment,” can also refer to causing regression, preventing the progression, or at least slowing down the progression of the disease, disorder, or condition. In a particular embodiment, “treat,” “treating,” and “treatment” refer to an alleviation, prevention of the development or onset, or reduction in the duration of one or more symptoms associated with the disease, disorder, or condition, such as a tumor or more preferably a cancer. In a particular embodiment, “treat,” “treating,” and “treatment” refer to prevention of the recurrence of the disease, disorder, or condition. In a particular embodiment, “treat,” “treating,” and “treatment” refer to an increase in the survival of a subject having the disease, disorder, or condition. In a particular embodiment, “treat,” “treating,” and “treatment” refer to elimination of the disease, disorder, or condition in the subject.

[0404] In some embodiments, a Vβ17×CD28 trispecific antibody provided herein is used in combination with a supplemental therapy. In some embodiments, the anti-Vβ17/anti-BCMA/anti-CD28 trispecific antibody provided herein is used in combination with a supplemental therapy. In some embodiments, the anti-Vβ17/anti-PSMA/anti-CD28 trispecific antibody provided herein is used in combination with a supplemental therapy.

[0405] As used herein, the term “in combination,” in the context of the administration of two or more therapies to a subject, refers to the use of more than one therapy. The use of the term “in combination” does not restrict the order in which therapies are administered to a subject. For example, a first therapy (e.g., a composition described herein) can be administered prior to (e.g., 5 minutes, 15 minutes, 30 minutes, 45 minutes, 1 hour, 2 hours, 4 hours, 6 hours, 12 hours, 16 hours, 24 hours, 48 hours, 72 hours, 96 hours, 1 week, 2 weeks, 3 weeks, 4 weeks, 5 weeks, 6 weeks, 8 weeks, or 12 weeks before), concomitantly with, or subsequent to (e.g., 5 minutes, 15 minutes, 30 minutes, 45 minutes, 1 hour, 2 hours, 4 hours, 6 hours, 12 hours, 16 hours, 24 hours, 48 hours, 72 hours, 96 hours, 1 week, 2 weeks, 3 weeks, 4 weeks, 5 weeks, 6 weeks, 8 weeks, or 12 weeks after) the administration of a second therapy to a subject.

[0406] Anti-Vβ17/anti-BCMA/anti-CD28 antibodies provided herein may also be used as agents to detect Vβ17-expressing cells. Thus, in another methods, provided is a method of detecting a cell expressing Vβ17, comprising contacting a cell with a Vβ17 antibody provided herein. Anti-Vβ17/anti-BCMA/anti-CD28 antibodies provided herein may also be used as agents to detect BCMA-expressing cells. Thus, in another methods, provided is a method of detecting a cell expressing BCMA, comprising contacting a cell with a BCMA antibody provided herein. Anti-Vβ17/anti-BCMA/anti-CD28 antibodies provided herein may also be used as agents to detect CD28-expressing cells. Thus, in another methods, provided is a method of detecting a cell expressing CD28, comprising contacting a cell with a CD28 antibody provided herein. In certain embodiments, the detecting is by ELISA. In some embodiments, the detecting is by FACS analysis. Also provided are kits comprising anti-Vβ17/anti-BCMA/anti-CD28 antibody provided herein, and instructions for use.

[0407] Anti-Vβ17/anti-PSMA/anti-CD28 antibodies provided herein may also be used as agents to detect Vβ17-expressing cells. Thus, in another methods, provided is a method of detecting a cell expressing Vβ17, comprising contacting a cell with a Vβ17 antibody provided herein. Anti-Vβ17/anti-PSMA/anti-CD28 antibodies provided herein may also be used as agents to detect PSMA-expressing cells. Thus, in another methods, provided is a method of detecting a cell expressing PSMA, comprising contacting a cell with a PSMA antibody provided herein. Anti-Vβ17/anti-PSMA/anti-CD28 antibodies provided herein may also be used as agents to detect CD28-expressing cells. Thus, in another methods, provided is a method of detecting a cell expressing CD28, comprising contacting a cell with a CD28 antibody provided herein. In certain embodiments, the detecting is by ELISA. In some embodiments, the detecting is by FACS analysis. Also provided are kits comprising anti-Vβ17/anti-PSMA/anti-CD28 antibody provided herein, and instructions for use.

[0408] Exemplary antibodies are provided herein, as well as the Examples, Tables, Figures and Sequence Listing.

### Embodiments

[0409] This invention provides the following non-limiting embodiments.

[0410] In a first set of embodiments, provided are:
[0411] A1. A trispecific antibody comprising: (a) a first binding domain that binds to Vβ17, (b) a second binding domain that binds to BCMA, and (c) a third binding domain that binds to CD28.
[0412] A2. The trispecific antibody of embodiment A1, wherein the first binding domain comprises (i) a VH comprising a VH CDR1 having an amino acid sequence of SEQ ID NO:48, a VH CDR2 having an amino acid sequence of SEQ ID NO:49, and a VH CDR3 having an amino acid sequence of SEQ ID NO:50; and (ii) a VL comprising a VL CDR1 having an amino acid sequence of SEQ ID NO:51, a VL CDR2 having an amino acid sequence of SEQ ID NO:52, and a VL CDR3 having an amino acid sequence of SEQ ID NO:53.
[0413] A3. The trispecific antibody of embodiment A2, wherein the antibody comprises:
   [0414] a VH having an amino acid sequence of SEQ ID NO:77;
   [0415] a VL having an amino acid sequence of SEQ ID NO:78; or
   [0416] a VH having an amino acid sequence of SEQ ID NO:77, and a VL having an amino acid sequence of SEQ ID NO:78.
[0417] A4. The trispecific antibody of embodiment A1, wherein the first binding domain comprises: (i) a VH comprising a VH CDR1 having an amino acid sequence of SEQ ID NO:48, a VH CDR2 having an amino acid sequence of SEQ ID NO:54, and a VH CDR3 having an amino acid sequence of SEQ ID NO:55; and (ii) a VL comprising a VL CDR1 having an amino acid sequence of SEQ ID NO:56, a VL CDR2 having an amino acid sequence of SEQ ID NO:57, and a VL CDR3 having an amino acid sequence of SEQ ID NO:58.
[0418] A5. The trispecific antibody of embodiment A4, wherein the antibody comprises:
   [0419] a VH having an amino acid sequence of SEQ ID NO:79;
   [0420] a VL having an amino acid sequence of SEQ ID NO:80; or
   [0421] a VH having an amino acid sequence of SEQ ID NO:79, and a VL having an amino acid sequence of SEQ ID NO:80.
[0422] A6. The trispecific antibody of embodiment A1, wherein the first binding domain comprises (i) a VH comprising a VH CDR1 having an amino acid sequence of SEQ ID NO:59, a VH CDR2 having an amino acid sequence of SEQ ID NO:49, and a VH CDR3 having an amino acid sequence of SEQ ID NO:60; and (ii) a VL comprising a VL CDR1 having an amino acid sequence of SEQ ID NO:61, a VL CDR2 having an amino acid sequence of SEQ ID NO:62, and a VL CDR3 having an amino acid sequence of SEQ ID NO:63.
[0423] A7. The trispecific antibody of embodiment A6, wherein the antibody comprises:
   [0424] a VH having an amino acid sequence of SEQ ID NO:81;
   [0425] a VL having an amino acid sequence of SEQ ID NO: 82; or
   [0426] a VH having an amino acid sequence of SEQ ID NO:81, and a VL having an amino acid sequence of SEQ ID NO:82.
[0427] A8. The trispecific antibody of embodiment A1, wherein the first binding domain comprises: (i) a VH comprising a VH CDR1 having an amino acid sequence of SEQ ID NO:64, a VH CDR2 having an amino acid sequence of SEQ ID NO:65, and a VH CDR3 having an amino acid sequence of SEQ ID NO:66; and (ii) a VL comprising a VL CDR1 having an amino acid sequence of SEQ ID NO:67, a VL CDR2 having an amino acid sequence of SEQ ID NO:68, and a VL CDR3 having an amino acid sequence of SEQ ID NO:69.
[0428] A9. The trispecific antibody of embodiment A8, wherein the antibody comprises:
   [0429] a VH having an amino acid sequence of SEQ ID NO:83;
   [0430] a VL having an amino acid sequence of SEQ ID NO: 84; or
   [0431] a VH having an amino acid sequence of SEQ ID NO: 83, and a VL having an amino acid sequence of SEQ ID NO:84.
[0432] A10. The trispecific antibody of embodiment A1, wherein the first binding domain comprises: (i) a VH comprising a VH CDR1 having an amino acid sequence of SEQ ID NO:70, a VH CDR2 having an amino acid sequence of SEQ ID NO:49, and a VH CDR3 having an amino acid sequence of SEQ ID NO:71; and (ii) a VL comprising a VL CDR1 having an amino acid sequence of SEQ ID NO:61, a VL CDR2 having an amino acid sequence of SEQ ID NO:72, and a VL CDR3 having an amino acid sequence of SEQ ID NO:73.
[0433] A11. The trispecific antibody of embodiment A10, wherein the antibody comprises:
   [0434] a VH having an amino acid sequence of SEQ ID NO:85;
   [0435] a VL having an amino acid sequence of SEQ ID NO: 86; or
   [0436] a VH having an amino acid sequence of SEQ ID NO: 85, and a VL having an amino acid sequence of SEQ ID NO:86.
[0437] A12. The trispecific antibody of embodiment A1, wherein the first binding domain comprises: (i) a VH comprising a VH CDR1 having an amino acid sequence of SEQ ID NO:48, a VH CDR2 having an amino acid sequence of SEQ ID NO:74, and a VH CDR3 having an amino acid sequence of SEQ ID NO:75; and (ii) a VL comprising a VL CDR1 having an amino acid sequence of SEQ ID NO:56, a VL CDR2 having an amino acid sequence of SEQ ID NO:57, and a VL CDR3 having an amino acid sequence of SEQ ID NO:76.
[0438] A13. The trispecific antibody of embodiment A12, wherein the antibody comprises:
   [0439] a VH having an amino acid sequence of SEQ ID NO:87;
   [0440] a VL having an amino acid sequence of SEQ ID NO:88; or
   [0441] a VH having an amino acid sequence of SEQ ID NO: 87, and a VL having an amino acid sequence of SEQ ID NO:88.
[0442] A14. The trispecific antibody of embodiment A1, wherein the first binding domain comprises: (i) a VH comprising a VH CDR1 having an amino acid sequence of SEQ ID NO:1, a VH CDR2 having an amino acid sequence of SEQ ID NO:2, and a VH CDR3 having an amino acid sequence of SEQ ID NO:3; and (ii) a VL comprising a VL CDR1 having an amino acid sequence of SEQ ID NO:666, a VL CDR2 having an amino acid sequence of SEQ ID NO:5, and a VL CDR3 having an amino acid sequence of SEQ ID NO:6.
[0443] A15. The trispecific antibody of embodiment A14, wherein the antibody comprises:
   [0444] a VH having an amino acid sequence of SEQ ID NO:21;
   [0445] a VL having an amino acid sequence of SEQ ID NO:665; or
   [0446] a VH having an amino acid sequence of SEQ ID NO:21, and a VL having an amino acid sequence of SEQ ID NO:665.
[0447] A16. The trispecific antibody of any one of embodiments A1 to A15, wherein the Vβ17 is present on the surface of a T cell.
[0448] A17. The trispecific antibody of any one of embodiments A1 to A16, wherein the second binding domain comprises: (i) a VH comprising a VH CDR1 having an amino acid sequence of SEQ ID NO:89, a VH CDR2 having an amino acid sequence of SEQ ID NO:90, and a VH CDR3 having an amino acid sequence of SEQ ID NO:91; and (ii) a VL comprising a VL CDR1 having an amino acid sequence of SEQ ID NO:92, a VL CDR2 having an amino acid sequence of SEQ ID NO:93, and a VL CDR3 having an amino acid sequence of SEQ ID NO:94.
[0449] A18. The trispecific antibody of embodiment A17, wherein the antibody comprises:
   [0450] a VH having an amino acid sequence of SEQ ID NO:95;
   [0451] a VL having an amino acid sequence of SEQ ID NO:1053; or
   [0452] a VH having an amino acid sequence of SEQ ID NO:95, and a VL having an amino acid sequence of SEQ ID NO:1053.
[0453] A19. The trispecific antibody of any one of embodiments A1 to A18, wherein the BCMA is present on the surface of a B cell.
[0454] A20. The trispecific antibody of any one of embodiments A1 to A19, wherein the second binding domain comprises: (i) a VH comprising a VH CDR1 having an amino acid sequence of SEQ ID NO:702, a VH CDR2 having an amino acid sequence of SEQ ID NO:708, and a VH CDR3 having an amino acid sequence of SEQ ID NO:714; and (ii) a VL comprising a VL CDR1 having an amino acid sequence of SEQ ID NO:794, a VL CDR2 having an amino acid sequence of SEQ ID NO:800, and a VL CDR3 having an amino acid sequence of SEQ ID NO:806.
[0455] A21. The trispecific antibody of embodiment A20, wherein the antibody comprises:
   [0456] a VH having an amino acid sequence of SEQ ID NO:690;
   [0457] a VL having an amino acid sequence of SEQ ID NO:696; or
   [0458] a VH having an amino acid sequence of SEQ ID NO:690, and a VL having an amino acid sequence of SEQ ID NO:696.
[0459] A22. The trispecific antibody of any one of embodiments A1 to A19, wherein the second binding domain comprises: (i) a VH comprising a VH CDR1 having an amino acid sequence of SEQ ID NO:703, a VH CDR2 having an amino acid sequence of SEQ ID NO:709, and a VH CDR3 having an amino acid sequence of SEQ ID NO:715; and (ii) a VL comprising a VL CDR1 having an amino acid sequence of SEQ ID NO:795, a VL CDR2 having an amino acid sequence of SEQ ID NO:801, and a VL CDR3 having an amino acid sequence of SEQ ID NO:807.
[0460] A23. The trispecific antibody of embodiment A22, wherein the antibody comprises:
   [0461] a VH having an amino acid sequence of SEQ ID NO:691;
   [0462] a VL having an amino acid sequence of SEQ ID NO:697; or
   [0463] a VH having an amino acid sequence of SEQ ID NO:691, and a VL having an amino acid sequence of SEQ ID NO:697.
[0464] A24. The trispecific antibody of any one of embodiments A1 to A19, wherein the second binding domain comprises: (i) a VH comprising a VH CDR1 having an amino acid sequence of SEQ ID NO:704, a VH CDR2 having an amino acid sequence of SEQ ID NO:710, and a VH CDR3 having an amino acid sequence of SEQ ID NO:716; and (ii) a VL comprising a VL CDR1 having an amino acid sequence of SEQ ID NO:796, a VL CDR2 having an amino acid sequence of SEQ ID NO:802, and a VL CDR3 having an amino acid sequence of SEQ ID NO:808.
[0465] A25. The trispecific antibody of embodiment A24, wherein the antibody comprises:
   [0466] a VH having an amino acid sequence of SEQ ID NO:692;
   [0467] a VL having an amino acid sequence of SEQ ID NO:698; or
   [0468] a VH having an amino acid sequence of SEQ ID NO:692, and a VL having an amino acid sequence of SEQ ID NO:698.
[0469] A26. The trispecific antibody of any one of embodiments A1 to A19, wherein the second binding domain comprises: (i) a VH comprising a VH CDR1 having an amino acid sequence of SEQ ID NO:705, a VH CDR2 having an amino acid sequence of SEQ ID NO:711, and a VH CDR3 having an amino acid sequence of SEQ ID NO:717; and (ii) a VL comprising a VL CDR1 having an amino acid sequence of SEQ ID NO:797, a VL CDR2 having an amino acid sequence of SEQ ID NO:803, and a VL CDR3 having an amino acid sequence of SEQ ID NO:809.
[0470] A27. The trispecific antibody of embodiment A26, wherein the antibody comprises:
   [0471] a VH having an amino acid sequence of SEQ ID NO:693;
   [0472] a VL having an amino acid sequence of SEQ ID NO:699; or
   [0473] a VH having an amino acid sequence of SEQ ID NO:693, and a VL having an amino acid sequence of SEQ ID NO:699.
[0474] A28. The trispecific antibody of any one of embodiments A1 to A27, wherein the CD28 is present on the surface of a T cell.
[0475] A29. The trispecific antibody of any one of embodiments A1 to A28, wherein the CD28 is present on the surface of a B cell.
[0476] A30. The trispecific antibody of any one of embodiments A1 to A29, wherein the first binding domain is humanized, the second binding domain is humanized, the third binding domain is humanized, the first binding domain and second binding domain are humanized, the first binding domain and third binding domain are humanized, the second binding domain and third binding domain are humanized or all three binding domains are humanized.
[0477] A31. The trispecific antibody of any one of embodiments A1 to 30, wherein the trispecific antibody is an IgG antibody.
[0478] A32. The trispecific antibody of embodiment A31, wherein the IgG antibody is an IgG1, IgG2, IgG3, or IgG4 antibody.
[0479] A33. The trispecific antibody of any one of embodiments A1 to A32, wherein the first binding domain binds a Vβ17 antigen.
[0480] A34. The trispecific antibody of any one of embodiments A1 to A32, wherein the first binding domain binds a Vβ17 epitope.
[0481] A35. The trispecific antibody of any one of embodiments A1 to A32, wherein the VH CDR1, VH CDR2, VH CDR3, VL CDR1, VL CDR2 and VL CDR3 form a binding site for an antigen of the Vβ17.
[0482] A36. The trispecific antibody of any one of embodiments A1 to A32, wherein the VH CDR1, VH CDR2, VH CDR3, VL CDR1, VL CDR2 and VL CDR3 form a binding site for an epitope of the Vβ17.
[0483] A37. The trispecific antibody of any one of embodiments A1 to A36, wherein the second binding domain binds an antigen of BCMA.
[0484] A38. The trispecific antibody of any one of embodiments A1 to A36, wherein the second binding domain binds an epitope of BCMA.
[0485] A39. The trispecific antibody of any one of embodiments A1 to A36, wherein the VH CDR1, VH CDR2, VH CDR3, VL CDR1, VL CDR2 and VL CDR3 form a binding site for an antigen of BCMA.
[0486] A40. The trispecific antibody of any one of embodiments A1 to A36, wherein the VH CDR1, VH CDR2, VH CDR3, VL CDR1, VL CDR2 and VL CDR3 form a binding site for an epitope of BCMA.
[0487] A41. The trispecific antibody of any one of embodiments A1 to A40, wherein the third binding domain binds an antigen of CD28.
[0488] A42. The trispecific antibody of any one of embodiments A1 to A40, wherein the third binding domain binds an epitope of CD28.
[0489] A43. The trispecific antibody of any one of embodiments A1 to A40, wherein the VH CDR1, VH CDR2, VH CDR3, VL CDR1, VL CDR2 and VL CDR3 form a binding site for an antigen of CD28.
[0490] A44. The trispecific antibody of any one of embodiments A1 to A40, wherein the VH CDR1, VH CDR2, VH CDR3, VL CDR1, VL CDR2 and VL CDR3 form a binding site for an epitope of CD28.
[0491] A45. The trispecific antibody of any one of embodiments A28 to A44, wherein the B cell is killed when the trispecific antibody binds to the Vβ17 on the surface of the T cell, CD28 on the surface of the T cell, and BCMA on the surface of the B cell.
[0492] A46. The trispecific antibody of any one of embodiments A29 to A44, wherein the B cell is killed when the trispecific antibody binds to the Vβ17 on the surface of the T cell, CD28 on the surface of the B cell, and BCMA on the surface of the B cell.
[0493] A47. The trispecific antibody of any one of embodiments A45 and A46, wherein the trispecific antibody induces T cell dependent cytotoxicity of the B cell in vitro with an EC₅₀ of less than about 500 pM.
[0494] A48. The trispecific antibody of any one of embodiments A45 and A46, wherein the trispecific antibody induces T cell dependent cytotoxicity of the B cell in vitro with an EC₅₀ of less than about 300 pM.
[0495] A49. The trispecific antibody of any one of embodiments A45 and A46, wherein the trispecific antibody induces T cell dependent cytotoxicity of the B cell in vitro with an EC₅₀ of less than about 160 pM.
[0496] A50. The trispecific antibody of any one of embodiments A47 to A49, wherein the EC₅₀ is assessed with a mixture of effector T cells and target B cells.
[0497] A51. The trispecific antibody of embodiment A50, wherein the effector cell to target cell ratio is about 0.01 to 1 to about 10 to 1.
[0498] A52. The trispecific antibody of embodiment A50, wherein the effector cell to target cell ratio is about 0.1 to 1 to about 5 to 1.
[0499] A53. The trispecific antibody of embodiment A50, wherein the effector cell to target cell ratio is about 1:1.
[0500] A54. The trispecific antibody of any one of embodiments A28 to 53, wherein the T cell releases cytokines when the trispecific antibody binds to CD28 on the surface of the T cell.
[0501] A55. The trispecific antibody of embodiment A54, wherein the cytokine is a chemokine, interferon, interleukin, or a protein belonging to the tumour necrosis factor superfamily.
[0502] A56. The trispecific antibody of embodiment A55, wherein the chemokine is a CC chemokine, CXC chemokine, C chemokine or a CX3C chemokine.
[0503] A57. The trispecific antibody of embodiment A55, wherein the interferon is a Type I interferon, Type 2 interferon or a Type 3 interferon.
[0504] A58. The trispecific antibody of embodiment A55, wherein the interleukin is an IL-1, IL-2, IL-3, IL-4, IL-5, IL-6, IL-7, IL-8, IL-9, IL-10, IL-11, IL-12, IL-13, IL-15 or an IL-17.
[0505] A59. The trispecific antibody of embodiment A55, wherein the protein belonging to the tumour necrosis factor superfamily is lymphotoxin alpha, tumor necrosis factor, lymphotoxin beta, OX40 ligand, CD40 ligand, Fas ligand, CD27 ligand, CD30 ligand, CD137 ligand, TNF-related apoptosis-inducing ligand, receptor activator of nuclear factor kappa-B ligand, TNF-related weak inducer of apoptosis, proliferation-inducing ligand, B-cell activating factor, LIGHT, vascular endothelial growth inhibitor, TNF superfamily member 18, or ectodysplasin A.
[0506] A60. The trispecific antibody of any one of embodiments A1 to A59, wherein the trispecific antibody is multivalent.
[0507] A61. The trispecific antibody of embodiment A60, wherein the trispecific antibody is capable of binding at least five antigens.
[0508] A62. A trispecific antibody comprising: a first means capable of binding Vβ17 on the surface of the T cell; a second means capable of binding BCMA on the surface of the B cell; and a third means capable of binding CD28 on the surface of the T cell.
[0509] A63. A trispecific antibody comprising: a first means capable of binding Vβ17 on the surface of the T cell; a second means capable of binding BCMA on the surface of the B cell; and a third means capable of binding CD28 on the surface of the B cell.
[0510] A64. The trispecific antibody of any one of embodiments A62 and A63, wherein the first means capable of binding Vβ17 binds a Vβ17 antigen.
[0511] A65. The trispecific antibody of any one of embodiments A62 and A63, wherein the first means capable of binding Vβ17 binds a Vβ17 epitope.
[0512] A66. The trispecific antibody of any one of embodiments A62 to A65, wherein the second means capable of binding BCMA binds a BCMA antigen.
[0513] A67. The trispecific antibody of any one of embodiments A62 to A65, wherein the second means capable of binding BCMA binds a BCMA epitope.
[0514] A68. The trispecific antibody of any one of embodiments A62 to A67, wherein the third means capable of binding CD28 binds a CD28 antigen.
[0515] A69. The trispecific antibody of any one of embodiments A62 to A67, wherein the third means capable of binding CD28 binds a CD28 epitope.
[0516] A70. A nucleic acid encoding the trispecific antibody of any one of embodiments A1 to A69.
[0517] A71. A vector comprising the nucleic acid of embodiment A70.
[0518] A72. A host cell comprising the vector of embodiment A71.
[0519] A73. A kit comprising the vector of embodiment A71 and packaging for the same.
[0520] A74. A pharmaceutical composition comprising the trispecific antibody of any one of embodiments A1 to A69, and a pharmaceutically acceptable carrier.
[0521] A75. A method of producing the pharmaceutical composition of embodiment A74, comprising combining the antibody with a pharmaceutically acceptable carrier to obtain the pharmaceutical composition.
[0522] A76. A method of directing a T cell expressing Vβ17 and CD28 to a B cell, the method comprising contacting the T cell with the trispecific antibody of any one of embodiments A1 to A69, wherein the contacting directs the T cell to the B cell.
[0523] A77. A method of inhibiting growth or proliferation of B cells expressing BCMA on the cell surface, the method comprising contacting the B cells with the trispecific antibody of any one of embodiments A1 to A69, wherein contacting the B cells with the pharmaceutical composition or the antibody or the trispecific antibody inhibits growth or proliferation of the B cells.
[0524] A78. The method of embodiment A77, wherein the B cells are in the presence of a T cell expressing Vβ17 while in contact with the trispecific antibody.
[0525] A79. The method of embodiment A77, wherein the B cells are in the presence of a T cell expressing CD28 while in contact with the trispecific antibody.
[0526] A80. A method of directing a T cell expressing Vβ17 to a B cell, the method comprising contacting the T cell with the trispecific antibody of any one of embodiments A1 to A69, wherein the contacting directs the T cell to the B cell.
[0527] A81. A method of inhibiting growth or proliferation of B cells expressing CD28 on the cell surface, the method comprising contacting the B cells with the trispecific antibody of any one of embodiments A1 to A69, wherein contacting the B cells with the pharmaceutical composition or the antibody or the trispecific antibody inhibits growth or proliferation of the B cells.
[0528] A82. The method of embodiment A81, wherein the B cells are in the presence of a T cell expressing Vβ17 while in contact with the trispecific antibody.
[0529] A83. A method for eliminating B cells expressing BCMA in a subject, comprising administering an effective amount of the trispecific antibody of any one of embodiments A1 to A69 to the subject.
[0530] A84. A method for eliminating B cells expressing CD28 in a subject, comprising administering an effective amount of the trispecific antibody of any one of embodiments A1 to A69 to the subject.
[0531] A85. The method of any one of embodiments A83 and 84, wherein the subject has a cancer.
[0532] A86. The method of embodiment A85, wherein the subject has a leukemia.
[0533] A87. The method of embodiment A85, wherein the subject has a lymphoma.
[0534] A88. A method treating a disease caused all or in part by B cells expressing BCMA in a subject, comprising administering an effective amount of the trispecific antibody of any one of embodiments A1 to A69 to the subject.
[0535] A89. A method treating a disease caused all or in part by B cells expressing CD28 in a subject, comprising administering an effective amount of the trispecific antibody of any one of embodiments A1 to A69 to the subject.
[0536] A90. The method of any one of embodiments A88 and 89, wherein the disease is cancer.
[0537] A91. The method of embodiment A90, wherein the disease is a leukemia.
[0538] A92. The method of embodiment A90, wherein the disease is a lymphoma.
[0539] A93. The method of any one of embodiments A83 to A92, wherein the subject is a subject in need thereof.
[0540] A94. The method of any one of embodiments A83 to A93, wherein the subject is a human.
[0541] A95. The trispecific antibody of any one of embodiments A1 to A69 for use in therapy.
[0542] A96. The trispecific antibody of any one of embodiments A1 to A69 for use in a method of treating cancer in a subject.
[0543] A97. The trispecific antibody for use according to embodiment A96, wherein the cancer is a leukemia.
[0544] A98. The trispecific antibody for use according to embodiment A96, wherein the cancer is a lymphoma.
[0545] A99. The trispecific antibody for use according to any one of embodiments A96 to A98 wherein the subject is a subject in need thereof.
[0546] A100. The trispecific antibody for use according to any one of embodiments A96 to A99, wherein the subject is a human.
[0547] A101. A method of activating a T cell expressing Vβ17, comprising contacting the T cell with the trispecific antibody of any one of embodiments A1 to A69.
[0548] A102. A method of activating a T cell expressing CD28, comprising contacting the T cell with the trispecific antibody of any one of embodiments A1 to A69.
[0549] A103. The method of embodiment A102, wherein the contacting results in an increase in cytokine expression, as compared to a control T cell expressing CD28.
[0550] A104. A process for making an antibody that binds to more than one target molecule, the process comprising:
   [0551] a step for performing a function of obtaining a binding domain capable of binding to Vβ17 on a T cell;
   [0552] a step for performing a function of obtaining a binding domain capable of binding to BCMA on a B cell;
   [0553] a step for performing a function of obtaining a binding domain capable of binding to CD28 on a T cell; and
   [0554] a step for performing a function of providing an antibody capable of binding to a Vβ17 antigen on the T cell, a BCMA antigen on the B cell and the CD28 antigen on the T cell.
[0555] A105. The process of embodiment A104, wherein the step for performing the function of obtaining the binding domain capable of binding to BCMA is repeated n times, wherein the process comprises n steps for performing the function of obtaining the binding domain capable of binding to Vβ17 on the T cell, and wherein the process further comprises n steps for performing the function of obtaining the binding domain capable of binding to CD28 on the T cell, and n number of target molecules, wherein n is at least 2.
[0556] A106. The process of embodiment A104, wherein the step for performing the function of obtaining the binding domain capable of binding to CD28 is repeated n times, wherein the process comprises n steps for performing the function of providing the binding domain capable of binding to Vβ17 on the T cell, and wherein the process further comprises n steps for performing the function of obtaining the binding domain capable of binding to BCMA on the B cell, and n number of target molecules, wherein n is at least 2.
[0557] A107. A process for making an antibody that binds to more than one target molecule, the process comprising:
   [0558] a step for performing a function of obtaining a binding domain capable of binding to Vβ17 on a T cell;
   [0559] a step for performing a function of obtaining a binding domain capable of binding to BCMA on a B cell;
   [0560] a step for performing a function of obtaining a binding domain capable of binding to CD28 on a B cell; and
   [0561] a step for performing a function of providing an antibody capable of binding to the Vβ17 antigen on the T cell, the BCMA antigen on the B cell and the CD28 antigen on the B cell.
[0562] A108. The process of embodiment A107, wherein the step for performing the function of obtaining the binding domain capable of binding to BCMA is repeated n times, wherein the process comprises n steps for performing the function of providing the binding domain capable of binding to Vβ17 on the T cell, and wherein the process further comprises n steps for performing the function of obtaining the binding domain capable of binding to CD28 on the B cell, and n number of target molecules, wherein n is at least 2.
[0563] A109. The process of embodiment A107, wherein the step for performing the function of obtaining the binding domain capable of binding to CD28 is repeated n times, and wherein the process comprises n steps for performing the function of providing the binding domain capable of binding to Vβ17 on the T cell, and wherein the process further comprises n steps for performing the function of obtaining the binding domain capable of binding to BCMA on the B cell, and n number of target molecules, wherein n is at least 2.
[0564] A110. The process of any one of embodiments A104 to A109, wherein the binding domain capable of binding to Vβ17 binds a Vβ17 antigen.
[0565] A111. The process of any one of embodiments A104 to A109, wherein the binding domain capable of binding to Vβ17 binds a Vβ17 epitope.
[0566] A112. The process of any one of embodiments A104 to A111, wherein the binding domain capable of binding to BCMA binds a BCMA antigen.
[0567] A113. The process of any one of embodiments A104 to A111, wherein the binding domain capable of binding to BCMA binds a BCMA epitope.
[0568] A114. The process of any one of embodiments A104 to A113, wherein the binding domain capable of binding to CD28 binds a CD28 antigen.
[0569] A115. The process of any one of embodiments A104 to A113, wherein the binding domain capable of binding to CD28 binds a CD28 epitope.

[0570] In a second set of embodiments, provided are:
[0571] B1. A trispecific antibody comprising: (a) a first binding domain that binds to Vβ17, (b) a second binding domain that binds to cancer antigen, and (c) a third binding domain that binds to CD28;
   [0572] wherein optionally the cancer antigen is BCMA, or
   [0573] wherein optionally the cancer antigen is PSMA.
[0574] B2. The trispecific antibody of embodiment B1, wherein the first binding domain that binds to Vβ17 comprises:
   [0575] (1) (i) a VH comprising a VH CDR1, a VH CDR2, and a VH CDR3 having an amino acid sequence of a VH CDR1, VH CDR2, and VH CDR3, respectively, of SEQ ID NO:9; and (ii) a VL comprising a VL CDR1, a VL CDR2, and a VL CDR3 having an amino acid sequence of a VL CDR1, VL CDR2, and VL CDR3, respectively, of SEQ ID NO:10;
   [0576] (2) (i) a VH comprising a VH CDR1, a VH CDR2, and a VH CDR3 having an amino acid sequence of a VH CDR1, VH CDR2, and VH CDR3, respectively, of SEQ ID NO:19; and (ii) a VL comprising a VL CDR1, a VL CDR2, and a VL CDR3 having an amino acid sequence of a VL CDR1, VL CDR2, and VL CDR3, respectively, of SEQ ID NO:22;
   [0577] (3) (i) a VH comprising a VH CDR1, a VH CDR2, and a VH CDR3 having an amino acid sequence of a VH CDR1, VH CDR2, and VH CDR3, respectively, of SEQ ID NO:19; and (ii) a VL comprising a VL CDR1, a VL CDR2, and a VL CDR3 having an amino acid sequence of a VL CDR1, VL CDR2, and VL CDR3, respectively, of SEQ ID NO:23;
   [0578] (4) (i) a VH comprising a VH CDR1, a VH CDR2, and a VH CDR3 having an amino acid sequence of a VH CDR1, VH CDR2, and VH CDR3, respectively, of SEQ ID NO:19; and (ii) a VL comprising a VL CDR1, a VL CDR2, and a VL CDR3 having an amino acid sequence of a VL CDR1, VL CDR2, and VL CDR3, respectively, of SEQ ID NO:24;
   [0579] (5) (i) a VH comprising a VH CDR1, a VH CDR2, and a VH CDR3 having an amino acid sequence of a VH CDR1, VH CDR2, and VH CDR3, respectively, of SEQ ID NO:20; and (ii) a VL comprising a VL CDR1, a VL CDR2, and a VL CDR3 having an amino acid sequence of a VL CDR1, VL CDR2, and VL CDR3, respectively, of SEQ ID NO:22;
   [0580] (6) (i) a VH comprising a VH CDR1, a VH CDR2, and a VH CDR3 having an amino acid sequence of a VH CDR1, VH CDR2, and VH CDR3, respectively, of SEQ ID NO:20; and (ii) a VL comprising a VL CDR1, a VL CDR2, and a VL CDR3 having an amino acid sequence of a VL CDR1, VL CDR2, and VL CDR3, respectively, of SEQ ID NO:23;
   [0581] (7) (i) a VH comprising a VH CDR1, a VH CDR2, and a VH CDR3 having an amino acid sequence of a VH CDR1, VH CDR2, and VH CDR3, respectively, of SEQ ID NO:20; and (ii) a VL comprising a VL CDR1, a VL CDR2, and a VL CDR3 having an amino acid sequence of a VL CDR1, VL CDR2, and VL CDR3, respectively, of SEQ ID NO:24;
   [0582] (8) (i) a VH comprising a VH CDR1, a VH CDR2, and a VH CDR3 having an amino acid sequence of a VH CDR1, VH CDR2, and VH CDR3, respectively, of SEQ ID NO:21; and (ii) a VL comprising a VL CDR1, a VL CDR2, and a VL CDR3 having an amino acid sequence of a VL CDR1, VL CDR2, and VL CDR3, respectively, of SEQ ID NO:22;
   [0583] (9) (i) a VH comprising a VH CDR1, a VH CDR2, and a VH CDR3 having an amino acid sequence of a VH CDR1, VH CDR2, and VH CDR3, respectively, of SEQ ID NO:21; and (ii) a VL comprising a VL CDR1, a VL CDR2, and a VL CDR3 having an amino acid sequence of a VL CDR1, VL CDR2, and VL CDR3, respectively, of SEQ ID NO:23;
   [0584] (10) (i) a VH comprising a VH CDR1, a VH CDR2, and a VH CDR3 having an amino acid sequence of a VH CDR1, VH CDR2, and VH CDR3, respectively, of SEQ ID NO:21; and (ii) a VL comprising a VL CDR1, a VL CDR2, and a VL CDR3 having an amino acid sequence of a VL CDR1, VL CDR2, and VL CDR3, respectively, of SEQ ID NO:24;
   [0585] (11) (i) a VH comprising a VH CDR1, a VH CDR2, and a VH CDR3 having an amino acid sequence of a VH CDR1, VH CDR2, and VH CDR3, respectively, of SEQ ID NO:46; and (ii) a VL comprising a VL CDR1, a VL CDR2, and a VL CDR3 having an amino acid sequence of a VL CDR1, VL CDR2, and VL CDR3, respectively, of SEQ ID NO:49;
   [0586] (12) (i) a VH comprising a VH CDR1, a VH CDR2, and a VH CDR3 having an amino acid sequence of a VH CDR1, VH CDR2, and VH CDR3, respectively, of SEQ ID NO:77; and (ii) a VL comprising a VL CDR1, a VL CDR2, and a VL CDR3 having an amino acid sequence of a VL CDR1, VL CDR2, and VL CDR3, respectively, of SEQ ID NO:78;
   [0587] (13) (i) a VH comprising a VH CDR1, a VH CDR2, and a VH CDR3 having an amino acid sequence of a VH CDR1, VH CDR2, and VH CDR3, respectively, of SEQ ID NO:79; and (ii) a VL comprising a VL CDR1, a VL CDR2, and a VL CDR3 having an amino acid sequence of a VL CDR1, VL CDR2, and VL CDR3, respectively, of SEQ ID NO:80. In some embodiments, the first binding domain comprises a VH having an amino acid sequence of SEQ ID NO:79;
   [0588] (14) (i) a VH comprising a VH CDR1, a VH CDR2, and a VH CDR3 having an amino acid sequence of a VH CDR1, VH CDR2, and VH CDR3, respectively, of SEQ ID NO:81; and (ii) a VL comprising a VL CDR1, a VL CDR2, and a VL CDR3 having an amino acid sequence of a VL CDR1, VL CDR2, and VL CDR3, respectively, of SEQ ID NO:82;
   [0589] (15) (i) a VH comprising a VH CDR1, a VH CDR2, and a VH CDR3 having an amino acid sequence of a VH CDR1, VH CDR2, and VH CDR3, respectively, of SEQ ID NO:83; and (ii) a VL comprising a VL CDR1, a VL CDR2, and a VL CDR3 having an amino acid sequence of a VL CDR1, VL CDR2, and VL CDR3, respectively, of SEQ ID NO:84;
   [0590] (16) (1) a VH comprising a VH CDR1, a VH CDR2, and a VH CDR3 having an amino acid sequence of a VH CDR1, VH CDR2, and VH CDR3, respectively, of SEQ ID NO:85; and (ii) a VL comprising a VL CDR1, a VL CDR2, and a VL CDR3 having an amino acid sequence of a VL CDR1, VL CDR2, and VL CDR3, respectively, of SEQ ID NO:86;
   [0591] (17) (i) a VH comprising a VH CDR1, a VH CDR2, and a VH CDR3 having an amino acid sequence of a VH CDR1, VH CDR2, and VH CDR3, respectively, of SEQ ID NO:87; and (ii) a VL comprising a VL CDR1, a VL CDR2, and a VL CDR3 having an amino acid sequence of a VL CDR1, VL CDR2, and VL CDR3, respectively, of SEQ ID NO:88;
   [0592] (18) (i) a VH comprising a VH CDR1, a VH CDR2, and a VH CDR3 having an amino acid sequence of a VH CDR1, VH CDR2, and VH CDR3, respectively, of SEQ ID NO:21; and (ii) a VL comprising a VL CDR1, a VL CDR2, and a VL CDR3 having an amino acid sequence of a VL CDR1, VL CDR2, and VL CDR3, respectively, of SEQ ID NO:665; or
   [0593] (19) (i) a VH comprising a VH CDR1, a VH CDR2, and a VH CDR3 having an amino acid sequence of a VH CDR1, VH CDR2, and VH CDR3, respectively, of SEQ ID NO:1084; and (ii) a VL comprising a VL CDR1, a VL CDR2, and a VL CDR3 having an amino acid sequence of a VL CDR1, VL CDR2, and VL CDR3, respectively, of SEQ ID NO:1085.
[0594] B3. The trispecific antibody of embodiment B2, wherein
   [0595] i. the VH CDR1, VH CDR2, VH CDR3, VL CDR1, VL CDR2, and VL CDR3 amino acid sequences of the first binding domain are according to the Kabat numbering system;
   [0596] ii. the VH CDR1, VH CDR2, VH CDR3, VL CDR1, VL CDR2, and VL CDR3 amino acid sequences of the first binding domain are according to the Chothia numbering system;
   [0597] iii. the VH CDR1, VH CDR2, VH CDR3, VL CDR1, VL CDR2, and VL CDR3 amino acid sequences of the first binding domain are according to the AbM numbering system;
   [0598] iv. the VH CDR1, VH CDR2, VH CDR3, VL CDR1, VL CDR2, and VL CDR3 amino acid sequences of the first binding domain are according to the Contact numbering system;
   [0599] v. the VH CDR1, VH CDR2, VH CDR3, VL CDR1, VL CDR2, and VL CDR3 amino acid sequences of the first binding domain are according to the IMGT numbering system; or
   [0600] vi. the VH CDR1, VH CDR2, VH CDR3, VL CDR1, VL CDR2, and VL CDR3 amino acid sequences of the first binding domain are according to the Exemplary numbering system.
[0601] B4. The trispecific antibody of any one of embodiments B1 to B3, wherein the first binding domain binds to Vβ17 that is present on the surface of a T cell.
[0602] B5. The trispecific antibody of any one of embodiments B1 to B4, wherein the cancer antigen is present on the surface of a cell.
[0603] B6. The trispecific antibody of any one of embodiments B1 to B5, wherein the cancer antigen is BCMA.
[0604] B7. The trispecific antibody of embodiment B6, wherein the BCMA is present on the surface of a B cell.
[0605] B8. The trispecific antibody of embodiment B6 or B7, wherein the second binding domain that binds to BCMA comprises:
   [0606] (1) (i) a VH comprising a VH CDR1, a VH CDR2, and a VH CDR3 having an amino acid sequence of a VH CDR1, VH CDR2, and VH CDR3, respectively, of SEQ ID NO:95; and (ii) a VL comprising a VL CDR1, a VL CDR2, and a VL CDR3 having an amino acid sequence of a VL CDR1, VL CDR2, and VL CDR3, respectively, of SEQ ID NO:96; or
   [0607] (2) (i) a VH comprising a VH CDR1, a VH CDR2, and a VH CDR3 having an amino acid sequence of a VH CDR1, VH CDR2, and VH CDR3, respectively, of SEQ ID NO:1052; and (ii) a VL comprising a VL CDR1, a VL CDR2, and a VL CDR3 having an amino acid sequence of a VL CDR1, VL CDR2, and VL CDR3, respectively, of SEQ ID NO:1053.
[0608] B9. The trispecific antibody of embodiment B8, wherein
   [0609] i. the VH CDR1, VH CDR2, VH CDR3, VL CDR1, VL CDR2, and VL CDR3 amino acid sequences of the second binding domain are according to the Kabat numbering system;
   [0610] ii. the VH CDR1, VH CDR2, VH CDR3, VL CDR1, VL CDR2, and VL CDR3 amino acid sequences of the second binding domain are according to the Chothia numbering system;
   [0611] iii. the VH CDR1, VH CDR2, VH CDR3, VL CDR1, VL CDR2, and VL CDR3 amino acid sequences of the second binding domain are according to the AbM numbering system;
   [0612] iv. the VH CDR1, VH CDR2, VH CDR3, VL CDR1, VL CDR2, and VL CDR3 amino acid sequences of the second binding domain are according to the Contact numbering system;
   [0613] v. the VH CDR1, VH CDR2, VH CDR3, VL CDR1, VL CDR2, and VL CDR3 amino acid sequences of the second binding domain are according to the IMGT numbering system; or
   [0614] vi. the VH CDR1, VH CDR2, VH CDR3, VL CDR1, VL CDR2, and VL CDR3 amino acid sequences of the second binding domain are according to the Exemplary numbering system.
[0615] B10. The trispecific antibody of any one of embodiments B1 to B5, wherein the cancer antigen is PSMA.
[0616] B11. The trispecific antibody of embodiment B10, wherein the PSMA is present on the surface of a prostate cell.
[0617] B12. The trispecific antibody of embodiment B10 or B11, wherein the second binding domain that binds to PSMA comprises:
   [0618] (i) a VH comprising a VH CDR1, a VH CDR2, and a VH CDR3 having an amino acid sequence of a VH CDR1, VH CDR2, and VH CDR3, respectively, of SEQ ID NO:1046; and (ii) a VL comprising a VL CDR1, a VL CDR2, and a VL CDR3 having an amino acid sequence of a VL CDR1, VL CDR2, and VL CDR3, respectively, of SEQ ID NO:1047.
[0619] B13. The trispecific antibody of embodiment B8, wherein
   [0620] i. the VH CDR1, VH CDR2, VH CDR3, VL CDR1, VL CDR2, and VL CDR3 amino acid sequences of the second binding domain are according to the Kabat numbering system;
   [0621] ii. the VH CDR1, VH CDR2, VH CDR3, VL CDR1, VL CDR2, and VL CDR3 amino acid sequences of the second binding domain are according to the Chothia numbering system;
   [0622] iii. the VH CDR1, VH CDR2, VH CDR3, VL CDR1, VL CDR2, and VL CDR3 amino acid sequences of the second binding domain are according to the AbM numbering system;
   [0623] iv. the VH CDR1, VH CDR2, VH CDR3, VL CDR1, VL CDR2, and VL CDR3 amino acid sequences of the second binding domain are according to the Contact numbering system;
   [0624] v. the VH CDR1, VH CDR2, VH CDR3, VL CDR1, VL CDR2, and VL CDR3 amino acid sequences of the second binding domain are according to the IMGT numbering system; or
   [0625] vi. the VH CDR1, VH CDR2, VH CDR3, VL CDR1, VL CDR2, and VL CDR3 amino acid sequences of the second binding domain are according to the Exemplary numbering system.
[0626] B14. The trispecific antibody of any one of embodiments B1 to B13, wherein the third binding domain binds to CD28 that is present on the surface of a T cell.
[0627] B15. The trispecific antibody of any one of embodiments B1 to B14, wherein the third binding domain that binds to CD28 comprises:
   [0628] (1) (i) a VH comprising a VH CDR1, a VH CDR2, and a VH CDR3 having an amino acid sequence of a VH CDR1, VH CDR2, and VH CDR3, respectively, of SEQ ID NO:690; and (ii) a VL comprising a VL CDR1, a VL CDR2, and a VL CDR3 having an amino acid sequence of a VL CDR1, VL CDR2, and VL CDR3, respectively, of SEQ ID NO:696;
   [0629] (2) (i) a VH comprising a VH CDR1, a VH CDR2, and a VH CDR3 having an amino acid sequence of a VH CDR1, VH CDR2, and VH CDR3, respectively, of SEQ ID NO:691; and (ii) a VL comprising a VL CDR1, a VL CDR2, and a VL CDR3 having an amino acid sequence of a VL CDR1, VL CDR2, and VL CDR3, respectively, of SEQ ID NO:697;
   [0630] (3) (i) a VH comprising a VH CDR1, a VH CDR2, and a VH CDR3 having an amino acid sequence of a VH CDR1, VH CDR2, and VH CDR3, respectively, of SEQ ID NO:692; and (ii) a VL comprising a VL CDR1, a VL CDR2, and a VL CDR3 having an amino acid sequence of a VL CDR1, VL CDR2, and VL CDR3, respectively, of SEQ ID NO:698; or
   [0631] (4) (i) a VH comprising a VH CDR1, a VH CDR2, and a VH CDR3 having an amino acid sequence of a VH CDR1, VH CDR2, and VH CDR3, respectively, of SEQ ID NO:693; and (ii) a VL comprising a VL CDR1, a VL CDR2, and a VL CDR3 having an amino acid sequence of a VL CDR1, VL CDR2, and VL CDR3, respectively, of SEQ ID NO:699.
[0632] B16. The trispecific antibody of embodiment B15, wherein
   [0633] i. the VH CDR1, VH CDR2, VH CDR3, VL CDR1, VL CDR2, and VL CDR3 amino acid sequences of the third binding domain are according to the Kabat numbering system;
   [0634] ii. the VH CDR1, VH CDR2, VH CDR3, VL CDR1, VL CDR2, and VL CDR3 amino acid sequences of the third binding domain are according to the Chothia numbering system;
   [0635] iii. the VH CDR1, VH CDR2, VH CDR3, VL CDR1, VL CDR2, and VL CDR3 amino acid sequences of the third binding domain are according to the AbM numbering system;
   [0636] iv. the VH CDR1, VH CDR2, VH CDR3, VL CDR1, VL CDR2, and VL CDR3 amino acid sequences of the third binding domain are according to the Contact numbering system;
   [0637] v. the VH CDR1, VH CDR2, VH CDR3, VL CDR1, VL CDR2, and VL CDR3 amino acid sequences of the third binding domain are according to the IMGT numbering system; or
   [0638] vi. the VH CDR1, VH CDR2, VH CDR3, VL CDR1, VL CDR2, and VL CDR3 amino acid sequences of the third binding domain are according to the Exemplary numbering system.
[0639] B17. The trispecific antibody of any one of embodiments B1 to B16, wherein
   [0640] i. the first binding domain is humanized,
   [0641] ii. the second binding domain is humanized,
   [0642] iii. the third binding domain is humanized,
   [0643] iv. the first binding domain and second binding domain are humanized,
   [0644] v. the first binding domain and third binding domain are humanized,
   [0645] vi. the second binding domain and third binding domain are humanized, or
   [0646] vii. the first binding domain, the second binding domain and the third binding domain are humanized.
[0647] B18. The trispecific antibody of any one of embodiments B1 to B17, wherein the trispecific antibody is an IgG antibody.
[0648] B19. The trispecific antibody of embodiment B18, wherein the IgG antibody is an IgG1, IgG2, IgG3, or IgG4 antibody.
[0649] B20. The trispecific antibody of embodiment B18 or B19, wherein the antibody comprises a kappa light chain.
[0650] B21. The trispecific antibody of embodiment B18 or B19, wherein the antibody comprises a lambda light chain.
[0651] B22. The trispecific antibody of any one of embodiments B1 to B21, wherein the first binding domain binds a Vβ17 antigen.
[0652] B23. The trispecific antibody of any one of embodiments B1 to B21, wherein the first binding domain binds a Vβ17 epitope.
[0653] B24. The trispecific antibody of any one of embodiments B1 to B21, wherein the VH CDR1, VH CDR2, VH CDR3, VL CDR1, VL CDR2 and VL CDR3 form a binding site for an antigen of the Vβ17.
[0654] B25. The trispecific antibody of any one of embodiments B1 to B21, wherein the VH CDR1, VH CDR2, VH CDR3, VL CDR1, VL CDR2 and VL CDR3 form a binding site for an epitope of the Vβ17.
[0655] B26. The trispecific antibody of any one of embodiments B1 to B25, wherein the first binding domain specifically binds to Vβ17.
[0656] B27. The trispecific antibody of any one of embodiments B1 to B26, wherein the second binding domain binds an antigen of BCMA.
[0657] B28. The trispecific antibody of any one of embodiments B1 to B26, wherein the second binding domain binds an epitope of BCMA.
[0658] B29. The trispecific antibody of any one of embodiments B1 to B26, wherein the VH CDR1, VH CDR2, VH CDR3, VL CDR1, VL CDR2 and VL CDR3 form a binding site for an antigen of BCMA.
[0659] B30. The trispecific antibody of any one of embodiments B1 to B26, wherein the VH CDR1, VH CDR2, VH CDR3, VL CDR1, VL CDR2 and VL CDR3 form a binding site for an epitope of BCMA.
[0660] B31. The trispecific antibody of any one of embodiments B27 to B30, wherein the second binding domain specifically binds to BCMA.
[0661] B32. The trispecific antibody of any one of embodiments B1 to B26, wherein the second binding domain binds an antigen of PSMA.
[0662] B33. The trispecific antibody of any one of embodiments B1 to B26, wherein the second binding domain binds an epitope of PSMA.
[0663] B34. The trispecific antibody of any one of embodiments B1 to B26, wherein the VH CDR1, VH CDR2, VH CDR3, VL CDR1, VL CDR2 and VL CDR3 form a binding site for an antigen of PSMA.
[0664] B35. The trispecific antibody of any one of embodiments B1 to B26, wherein the VH CDR1, VH CDR2, VH CDR3, VL CDR1, VL CDR2 and VL CDR3 form a binding site for an epitope of PSMA.
[0665] B36. The trispecific antibody of any one of embodiments B32 to B35, wherein the second binding domain specifically binds to PSMA.
[0666] B37. The trispecific antibody of any one of embodiments B1 to B36, wherein the third binding domain binds an antigen of CD28.
[0667] B38. The trispecific antibody of any one of embodiments B1 to B36, wherein the third binding domain binds an epitope of CD28.
[0668] B39. The trispecific antibody of any one of embodiments B1 to B36, wherein the VH CDR1, VH CDR2, VH CDR3, VL CDR1, VL CDR2 and VL CDR3 form a binding site for an antigen of CD28.
[0669] B40. The trispecific antibody of any one of embodiments B1 to B36, wherein the VH CDR1, VH CDR2, VH CDR3, VL CDR1, VL CDR2 and VL CDR3 form a binding site for an epitope of CD28.
[0670] B41. The trispecific antibody of any one of embodiments B1 to B40, wherein the third binding domain specifically binds to CD28.
[0671] B42. The trispecific antibody of any one of embodiments B1 to B35, wherein the trispecific antibody is multivalent.
[0672] B43. A trispecific antibody comprising: a first means capable of binding Vβ17 on the surface of a T cell; a second means capable of binding a cancer antigen on the surface of a cancer cell; and a third means capable of binding CD28 on the surface of the T cell.
[0673] B44. The trispecific antibody of embodiment B43, wherein the cancer antigen is BCMA and the cancer cell is a B cell cancer cell.
[0674] B45. The trispecific antibody of embodiment B43, wherein the cancer antigen is PSMA and the cancer cell is a prostate cancer cell.
[0675] B46. A nucleic acid encoding the trispecific antibody of any one of embodiments B1 to B45.
[0676] B47. A vector comprising the nucleic acid of embodiment B46.
[0677] B48. A host cell comprising the vector of embodiment B47.
[0678] B49. A kit comprising the vector of embodiment B47 and packaging for the same.
[0679] B50. A kit comprising the trispecific antibody of any one of embodiments B1 to B45 and packaging for the same.
[0680] B51. A pharmaceutical composition comprising the trispecific antibody of any one of embodiments B1 to B45, and a pharmaceutically acceptable carrier.
[0681] B52. A method of producing the pharmaceutical composition of embodiment B51, comprising combining the trispecific antibody with a pharmaceutically acceptable carrier to obtain the pharmaceutical composition.
[0682] B53. A method of activating a T cell expressing Vβ17, comprising contacting the T cell with the trispecific antibody of any one of embodiments B1 to B45.
[0683] B54. A process for making an antibody that binds to more than one target molecule, the process comprising:
   [0684] a step for performing a function of obtaining a first binding domain capable of binding to Vβ17 on a T cell;
   [0685] a step for performing a function of obtaining a second binding domain capable of binding to cancer antigen on a cancer cell;
   [0686] a step for performing a function of obtaining a third binding domain capable of binding to CD28 on a T cell; and
   [0687] a step for performing a function of providing an antibody capable of binding to a Vβ17 antigen on the T cell, a cancer antigen on the cancer cell and the CD28 antigen on the T cell.
[0688] B55. The process of embodiment B54, wherein (i) the step for performing a function of obtaining a second binding domain that binds to the cancer antigen on the cancer cell is repeated n times, and further comprising n steps for performing a function of providing a first binding domain that binds to Vβ17 present on a T cell and n number of target molecules, wherein n is at least 2, or (ii) the step for performing a function of obtaining a third binding domain that binds to the CD28 on the T cell is repeated n times, and further comprising n steps for performing a function of providing a first binding domain that binds to Vβ17 present on a T cell and n number of target molecules, wherein n is at least 2.
[0689] B56. A method of directing a T cell expressing Vβ17 and CD28 to a B cell, the method comprising contacting the T cell with the trispecific antibody of any one of embodiments B1 to B45, wherein the contacting directs the T cell to the B cell.
[0690] B57. A method of inhibiting growth or proliferation of B cells expressing BCMA on the cell surface, the method comprising contacting the B cells with the trispecific antibody of any one of embodiments B1 to B45, wherein contacting the B cells with the pharmaceutical composition or the antibody or the trispecific antibody inhibits growth or proliferation of the B cells.
[0691] B58. The method of embodiment B57, wherein the B cells are in the presence of a T cell expressing Vβ17 while in contact with the trispecific antibody.
[0692] B59. The method of embodiment B57, wherein the B cells are in the presence of a T cell expressing CD28 while in contact with the trispecific antibody.
[0693] B60. A method of directing a T cell expressing Vβ17 to a cancer cell, the method comprising contacting the T cell with the trispecific antibody of any one of embodiments B1 to B45, wherein the contacting directs the T cell to the cancer cell.
[0694] B61. A method of inhibiting the growth or proliferation of a cancer cell, comprising contacting the trispecific antibody of any one of embodiments B1 to B45 with the cancer cell having the cancer antigen present on the surface of the cancer cell, wherein the contacting is in the presence of a T cell expressing the Vβ17, and wherein the contacting results in the inhibition of the growth or proliferation of the cancer cell.
[0695] B62. A method of eliminating a cancer cell in a subject, comprising contacting the trispecific antibody of any one of embodiments B1 to B45 with the cancer cell having the cancer antigen present on the surface of the cancer cell, wherein the contacting is in the presence of a T cell expressing the Vβ17, and wherein the contacting results in the elimination of the cancer cell.
[0696] B63. A method of treating a disease in a subject, comprising administering an effective amount of the trispecific antibody of any one of embodiments B1 to B45 to the subject, wherein the disease is caused all or in part by a cancer cell having the cancer antigen present on the surface of the cancer cell.
[0697] B64. The method of embodiment B62 or B63, wherein the subject is a human.
[0698] B65. The method of any one of embodiments B62 to B64, wherein the subject is a subject in need thereof.
[0699] B66. The trispecific antibody of any one of embodiments B1 to B45 or the method of any one of embodiments B56 to B65, wherein the cancer antigen is present on the surface of a cancer cell.
[0700] B67. The trispecific antibody or method of embodiment B66, wherein
   [0701] (i) the cancer cell is a cell of an adrenal cancer, anal cancer, appendix cancer, bile duct cancer, bladder cancer, bone cancer, brain cancer, breast cancer, cervical cancer, colorectal cancer, esophageal cancer, gallbladder cancer, gestational trophoblastic, head and neck cancer, Hodgkin lymphoma, intestinal cancer, kidney cancer, leukemia, liver cancer, lung cancer, melanoma, mesothelioma, multiple myeloma, neuroendocrine tumor, non-Hodgkin lymphoma, oral cancer, ovarian cancer, pancreatic cancer, prostate cancer, sinus cancer, skin cancer, soft tissue sarcoma spinal cancer, stomach cancer, testicular cancer, throat cancer, thyroid cancer, uterine cancer endometrial cancer, vaginal cancer, or vulvar cancer;
   [0702] (ii) cancer antigen is an angiopoietin, BCMA, CD19, CD20, CD22, CD25 (IL2-R), CD30, CD33, CD37, CD38, CD52, CD56, CD123 (IL-3R), cMET, DLL/Notch, EGFR, EpCAM, FGF, FGF-R, GD2, HER2, Mesothelin, Nectin-4, PAP, PDGFRα, PSA, PSA3, PSMA, RANKL, SLAMF7, STEAPI, TARP, TROP2, VEGF, or VEGF-R antigen; and/or
   [0703] (iii) the cancer antigen is a CEA, immature laminin receptor, TAG-72, HPV E6, HPV E7, BING-4, calcium-activated chloride channel 2, cyclin-B1, 9D7, EpCAM, EphA3, Her2/neu, telomerase, mesothelin, SAP-1, surviving, a BAGE family antigen, CAGE family antigen, GAGE family antigen, MAGE family antigen, SAGE family antigen, XAGE family antigen, NY-ESO-1/LAGE-1, PRAME, SSX-2, Melan-A, MART-1, Gp100, pmel17, tyrosinase, TRP-1, TRP-2, P. polypeptide, MC1R, prostate-specific antigen, β-catenin, or BRCA1 antigen.
[0704] B68. The trispecific antibody or method embodiment B67, wherein
   [0705] (i) the adrenal cancer is an adrenocortical carcinoma (ACC), adrenal cortex cancer, pheochromocytoma, or neuroblastoma;
   [0706] (ii) the anal cancer is a squamous cell carcinoma, cloacogenic carcinoma, adenocarcinoma, basal cell carcinoma, or melanoma;
   [0707] (iii) the appendix cancer is a neuroendocrine tumor (NET), mucinous adenocarcinoma, goblet cell carcinoid, intestinal-type adenocarcinoma, or signet-ring cell adenocarcinoma;
   [0708] (iv) the bile duct cancer is an extrahepatic bile duct cancer, adenocarcinomas, hilar bile duct cancer, perihilar bile duct cancer, distal bile duct cancer, or intrahepatic bile duct cancer;
   [0709] (v) the bladder cancer is transitional cell carcinoma (TCC), papillary carcinoma, flat carcinoma, squamous cell carcinoma, adenocarcinoma, small-cell carcinoma, or sarcoma;
   [0710] (vi) the bone cancer is a primary bone cancer, sarcoma, osteosarcoma, chondrosarcoma, sarcoma, fibrosarcoma, malignant fibrous histiocytoma, giant cell tumor of bone, chordoma, or metastatic bone cancer;
   [0711] (vii) the brain cancer is an astrocytoma, brain stem glioma, glioblastoma, meningioma, ependymoma, oligodendroglioma, mixed glioma, pituitary carcinoma, pituitary adenoma, craniopharyngioma, germ cell tumor, pineal region tumor, medulloblastoma, or primary CNS lymphoma;
   [0712] (viii) the breast cancer is a breast adenocarcinoma, invasive breast cancer, noninvasive breast cancer, breast sarcoma, metaplastic carcinoma, adenocystic carcinoma, phyllodes tumor, angiosarcoma, HER2-positive breast cancer, triple-negative breast cancer, or inflammatory breast cancer;
   [0713] (ix) the cervical cancer is a squamous cell carcinoma, or adenocarcinoma;
   [0714] (x) the colorectal cancer is a colorectal adenocarcinoma, primary colorectal lymphoma, gastrointestinal stromal tumor, leiomyosarcoma, carcinoid tumor, mucinous adenocarcinoma, signet ring cell adenocarcinoma, gastrointestinal carcinoid tumor, or melanoma;
   [0715] (xi) the esophageal cancer is an adenocarcinoma or squamous cell carcinoma;
   [0716] (xii) the gall bladder cancer is an adenocarcinoma, papillary adenocarcinoma, adenosquamous carcinoma, squamous cell carcinoma, small cell carcinoma, or sarcoma;
   [0717] (xiii) the gestational trophoblastic disease (GTD) is a hydatidiform mole, gestational trophoblastic neoplasia (GTN), choriocarcinoma, placental-site trophoblastic tumor (PSTT), or epithelioid trophoblastic tumor (ETT);
   [0718] (xiv) the head and neck cancer is a laryngeal cancer, nasopharyngeal cancer, hypopharyngeal cancer, nasal cavity cancer, paranasal sinus cancer, salivary gland cancer, oral cancer, oropharyngeal cancer, or tonsil cancer;
   [0719] (xv) the Hodgkin lymphoma is a classical Hodgkin lymphoma, nodular sclerosis, mixed cellularity, lymphocyte-rich, lymphocyte-depleted, or nodular lymphocyte-predominant Hodgkin lymphoma (NLPHL);
   [0720] (xvi) the intestinal cancer is a small intestine cancer, small bowel cancer, adenocarcinoma, sarcoma, gastrointestinal stromal tumors, carcinoid tumors, or lymphoma;
   [0721] (xvii) the kidney cancer is a renal cell carcinoma (RCC), clear cell RCC, papillary RCC, chromophobe RCC, collecting duct RCC, unclassified RCC, transitional cell carcinoma, urothelial cancer, renal pelvis carcinoma, or renal sarcoma;
   [0722] (xviii) the leukemia is an acute lymphocytic leukemia (ALL), acute myeloid leukemia (AMIL), chronic lymphocytic leukemia (CLL), chronic myeloid leukemia (CML), hairy cell leukemia (HCL), or a myelodysplastic syndrome (MDS);
   [0723] (xix) the liver cancer is a hepatocellular carcinoma (HCC), fibrolamellar HCC, cholangiocarcinoma, angiosarcoma, or liver metastasis;
   [0724] (xx) the lung cancer is a small cell lung cancer, small cell carcinoma, combined small cell carcinoma, non-small cell lung cancer, lung adenocarcinoma, squamous cell lung cancer, large-cell undifferentiated carcinoma, pulmonary nodule, metastatic lung cancer, adenosquamous carcinoma, large cell neuroendocrine carcinoma, salivary gland-type lung carcinoma, lung carcinoid, mesothelioma, sarcomatoid carcinoma of the lung, or malignant granular cell lung tumor;
   [0725] (xxi) the melanoma is a superficial spreading melanoma, nodular melanoma, acral-lentiginous melanoma, lentigo maligna melanoma, amelanotic melanoma, desmoplastic melanoma, ocular melanoma, or metastatic melanoma;
   [0726] (xxii) the mesothelioma is a pleural mesothelioma, peritoneal mesothelioma, pericardial mesothelioma, or testicular mesothelioma;
   [0727] (xxiii) the multiple myeloma is an active myeloma or smoldering myeloma;
   [0728] (xxiv) the neuroendocrine tumor, is a gastrointestinal neuroendocrine tumor, pancreatic neuroendocrine tumor, or lung neuroendocrine tumor;
   [0729] (xxv) the non-Hodgkin's lymphoma is an anaplastic large-cell lymphoma, lymphoblastic lymphoma, peripheral T cell lymphoma, follicular lymphoma, cutaneous T cell lymphoma, lymphoplasmacytic lymphoma, marginal zone B-cell lymphoma, MALT lymphoma, small-cell lymphocytic lymphoma, Burkitt lymphoma, chronic lymphocytic leukemia (CLL), small lymphocytic lymphoma (SLL), precursor T-lymphoblastic leukemia/lymphoma, acute lymphocytic leukemia (ALL), adult T cell lymphoma/leukemia (ATLL), hairy cell leukemia, B-cell lymphomas, diffuse large B-cell lymphoma (DLBCL), primary mediastinal B-cell lymphoma, primary central nervous system (CNS) lymphoma, mantle cell lymphoma (MCL), marginal zone lymphomas, mucosa-associated lymphoid tissue (MALT) lymphoma, nodal marginal zone B-cell lymphoma, splenic marginal zone B-cell lymphoma, lymphoplasmacytic lymphoma, B-cell non-Hodgkin lymphoma, T cell non-Hodgkin lymphoma, natural killer cell lymphoma, cutaneous T cell lymphoma, Alibert-Bazin syndrome, Sezary syndrome, primary cutaneous anaplastic large-cell lymphoma, peripheral T cell lymphoma, angioimmunoblastic T cell lymphoma (AITL), anaplastic large-cell lymphoma (ALCL), systemic ALCL, enteropathy-type T cell lymphoma (EATL), or hepatosplenic gamma/delta T cell lymphoma;
   [0730] (xxvi) the oral cancer is a squamous cell carcinoma, verrucous carcinoma, minor salivary gland carcinomas, lymphoma, benign oral cavity tumor, eosinophilic granuloma, fibroma, granular cell tumor, karatoacanthoma, leiomyoma, osteochondroma, lipoma, schwannoma, neurofibroma, papilloma, condyloma acuminatum, verruciform xanthoma, pyogenic granuloma, rhabdomyoma, odontogenic tumors, leukoplakia, erythroplakia, squamous cell lip cancer, basal cell lip cancer, mouth cancer, gum cancer, or tongue cancer;
   [0731] (xxvii) the ovarian cancer is a ovarian epithelial cancer, mucinous epithelial ovarian cancer, endometrioid epithelial ovarian cancer, clear cell epithelial ovarian cancer, undifferentiated epithelial ovarian cancer, ovarian low malignant potential tumors, primary peritoneal carcinoma, fallopian tube cancer, germ cell tumors, teratoma, dysgerminoma ovarian germ cell cancer, endodermal sinus tumor, sex cord-stromal tumors, sex cord-gonadal stromal tumor, ovarian stromal tumor, granulosa cell tumor, granulosa-theca tumor, Sertoli-Leydig tumor, ovarian sarcoma, ovarian carcinosarcoma, ovarian adenosarcoma, ovarian leiomyosarcoma, ovarian fibrosarcoma, Krukenberg tumor, or ovarian cyst;
   [0732] (xxviii) the pancreatic cancer is a pancreatic exocrine gland cancer, pancreatic endocrine gland cancer, or pancreatic adenocarcinoma, islet cell tumor, or neuroendocrine tumor;
   [0733] (xxix) the prostate cancer is a prostate adenocarcinoma, prostate sarcoma, transitional cell carcinoma, small cell carcinoma, or neuroendocrine tumor;
   [0734] (xxx) the sinus cancer is a squamous cell carcinoma, mucosa cell carcinoma, adenoid cystic cell carcinoma, acinic cell carcinoma, sinonasal undifferentiated carcinoma, nasal cavity cancer, paranasal sinus cancer, maxillary sinus cancer, ethmoid sinus cancer, or nasopharynx cancer;
   [0735] (xxxi) the skin cancer is a basal cell carcinoma, squamous cell carcinoma, melanoma, Merkel cell carcinoma, Kaposi sarcoma (KS), actinic keratosis, skin lymphoma, or keratoacanthoma;
   [0736] (xxxii) the soft tissue cancer is an angiosarcoma, dermatofibrosarcoma, epithelioid sarcoma, Ewing's sarcoma, fibrosarcoma, gastrointestinal stromal tumors (GISTs), Kaposi sarcoma, leiomyosarcoma, liposarcoma, dedifferentiated liposarcoma (DL), myxoid/round cell liposarcoma (MRCL), well-differentiated liposarcoma (WDL), malignant fibrous histiocytoma, neurofibrosarcoma, rhabdomyosarcoma (RMS), or synovial sarcoma;
   [0737] (xxxiii) the spinal cancer is a spinal metastatic tumor;
   [0738] (xxxiv) the stomach cancer is a stomach adenocarcinoma, stomach lymphoma, gastrointestinal stromal tumors, carcinoid tumor, gastric carcinoid tumors, Type I ECL-cell carcinoid, Type II ECL-cell carcinoid, or Type III ECL-cell carcinoid;
   [0739] (xxxv) the testicular cancer is a seminoma, non-seminoma, embryonal carcinoma, yolk sac carcinoma, choriocarcinoma, teratoma, gonadal stromal tumor, leydig cell tumor, or sertoli cell tumor;
   [0740] (xxxiv) the throat cancer is a squamous cell carcinoma, adenocarcinoma, sarcoma, laryngeal cancer, pharyngeal cancer, nasopharynx cancer, oropharynx cancer, hypopharynx cancer, laryngeal cancer, laryngeal squamous cell carcinoma, laryngeal adenocarcinoma, lymphoepithelioma, spindle cell carcinoma, verrucous cancer, undifferentiated carcinoma, or lymph node cancer;
   [0741] (xxxv) the thyroid cancer is a papillary carcinoma, follicular carcinoma, Hürthle cell carcinoma, medullary thyroid carcinoma, or anaplastic carcinoma;
   [0742] (xxxvi) the uterine cancer is an endometrial cancer, endometrial adenocarcinoma, endometroid carcinoma, serous adenocarcinoma, adenosquamous carcinoma, uterine carcinosarcoma, uterine sarcoma, uterine leiomyosarcoma, endometrial stromal sarcoma, or undifferentiated sarcoma;
   [0743] (xxxvii) the vaginal cancer is a squamous cell carcinoma, adenocarcinoma, melanoma, or sarcoma; or
   [0744] (xxxviii) the vulvar cancer is a squamous cell carcinoma or adenocarcinoma.
[0745] B69. The trispecific antibody or method of embodiment B66, wherein the cancer antigen is BCMA.
[0746] B70. The trispecific antibody or method of embodiment B69, wherein the cancer cell is a B cell.
[0747] B71. The trispecific antibody or method of embodiment B69 or B70, wherein the cancer is a lymphoma.
[0748] B72. The trispecific antibody or method of embodiment B69 or B70, wherein the cancer is a leukemia.
[0749] B73. The trispecific antibody or method of embodiment B66, wherein the cancer antigen is PSMA.
[0750] B74. The trispecific antibody or method of embodiment B69, wherein the cancer cell is a prostate cancer cell.
[0751] B75. The trispecific antibody or method of embodiment B69 or B70, wherein the cancer is a prostate cancer.

[0752] Representative amino acid sequences of trispecific antibodies provided herein are shown in the Tables provided in the Examples section and the sequence listing and are contemplated as certain embodiments. In addition, representative nucleic acid sequences encoding antibodies provided herein are shown in the Tables provided in the Examples section and the sequence listing and are contemplated as certain embodiments.

[0753] Also provided in the Examples herein are exemplary multi-specific (trispecific) antibodies that bind to Vβ17, CD28 and BCMA. These Examples are illustrative of additional exemplary trispecific antibodies that can effectively target a variety of cells and tissues in a subject. In some embodiments, provided herein is a trispecific antibody comprising: (a) a first binding domain that binds to a Vβ17 antigen, (b) a second binding domain that binds to BCMA, and (c) a third binding domain that binds to CD28.

[0754] Exemplary binding agents that bind to Vβ17, exemplary binding agents that bind to CD28, as well as exemplary binding agents that bind to BCMA are provided elsewhere herein.

[0755] Particular embodiments of this invention are described herein. Upon reading the foregoing description, variations of the disclosed embodiments may become apparent to individuals working in the art, and it is expected that those skilled artisans may employ such variations as appropriate. Accordingly, it is intended that the invention be practiced otherwise than as specifically described herein, and that the invention includes all modifications and equivalents of the subject matter recited in the claims appended hereto as permitted by applicable law. Moreover, any combination of the above-described elements in all possible variations thereof is encompassed by the invention unless otherwise indicated herein or otherwise clearly contradicted by context. A number of embodiments of the invention have been described. Nevertheless, it will be understood that various modifications may be made without departing from the spirit and scope of the invention. Accordingly, the descriptions in the Examples section are intended to illustrate but not limit the scope of invention described in the claims.

### EXAMPLES

[0756] The following examples are based on the premise that T cells demonstrate potent anti-tumor functions. These cells express TCR-haplotype-Vβ17 and majority of these cells exhibit efficient cytotoxicity of tumor target cells. This ability is then harnessed using trispecific antibodies constructed such that one arm binds to the Vβ17 structure, the other arm binds to CD28 on the T cells and the third arm binds BCMA on B cells, often in B-cell-mediated tumor cells. Thus, the trispecific antibody bridges the effector and target cells together-resulting in tumor killing. This mechanism of action is described in the schematic outlined in FIG. 1.

### Example 1: Human Framework Adaptation of Anti-Vβ17 MAB E17.5F

[0757] The mouse IgG1 anti-human T cell receptor Vβ17 clone E17.5F was commercially sourced. Sample preparation and LC/MSMS analysis were performed at Protea Bioscience Inc. (Morgantown, W. Va.). The sample was reduced and alkylated, divided into seven aliquots, and proteolytically digested with Trypsin/LysC, Chymotrypsin, LysC, Pepsin, and AspN, Elastase, and Proteinase K enzymes. Resulting peptides were desalted using a ZIPTIP C18 Pipette Tips and separated on-line using reverse phase chromatography. Mass spectrometry was performed on Thermo Q-EXACTIVE spectrometer using HCD fragmentation. MS data sets were analyzed using PEAKS software by matching de novo sequence tags to an IMGT-based antibody sequences database. Gaps in the sequence were assigned using Contig sequence assembly of de novo identified peptides. All CDRs and hyper-mutations were confirmed by inspecting the MS/MS spectra

[0758] The sequences obtained are shown in Tables 1 and 2.

TABLE 1
CDR Sequences of TCR Vβ17 clone E17.5F.

| | | SEQ | | SEQ | | SEQ |
|---|---|---|---|---|---|---|
| | | ID | | ID | | ID |
| Antibody | HCDR1 | NO: | HCDR2 | NO: | HCDR3 | NO: |
| E17.5F | GYSITSGYFWN | 1 | YISYDGSNN | 2 | PSPGTGYAVDY | 3 |
| | | SEQ | | SEQ | | SEQ |
| | | ID | | ID | | ID |
| Antibody | LCDR1 | NO: | LCDR2 | NO: | LCDR3 | NO: |
| E17.5F | RSSQSLVHSNG | 4 | KVSNRFS | 5 | SQSTHVPFT | 6 |
| | NTYLH | | | | | |

TABLE 2
Heavy chain and light chain sequences of TCR Vb17 clone E17.5F.

| | | SEQ |
|---|---|---|
| mAb | | ID |
| ID | Heavy Chain Amino Acid Sequence | NO: |
| B17B01 | NVQLQESGPGLVKPSQSLSLTCSVAGYSITSGYFWNWIRQFPGNKLEWMGYIS | 7 |
| | YDGSNNYNPSLKNRISITRDTSKNQFFLKLNSVTTEDTATYYCASPSPGTGYAV | |
| | DYWGQGTSVTVSSAKTTPPSVYPLAPGSAAQTNSMVTLGCLVKGYFPEPVTV | |
| | TWNSGSLSSGVHTFPAVLQSDLYTLSSSVTVPSSTWPSQTVTCNVAHPASSTKV | |
| | DKKIVPRDCGCKPCICTVPEVSSVFIFPPKPKDVLTITLTPKVTCVVVDISKDDPE | |
| | VQFSWFVDDVEVHTAQTKPREEQINSTFRSVSELPIMHQDWLNGKEFKCRVNS | |
| | AAFPAPIEKTISKTYGRPKAPQVYTIPPPKEQMAKDKVSLTCMITNFFPEDITVE | |
| | WQWNGQPAENYKNTQPIMDTDGSYFVYSKLNVQKSNWEAGNTFTCSVLHEG | |
| | LHNHHTEKSLSHSPGK | |
| | | SEQ |
| | | ID |
| | Light Chain Amino Acid Sequence | NO: |
| B17B01 | NVVMTQTPLSLPVSLGDQASISCRSSQSLVHSNGNTYLHWYLQKPGQSPKFLIY | 8 |
| | KVSNRFSGVPDRFSGGGSGTEFTLKISRVEAEDLGVYFCSQSTHVPFTFGSGTK | |
| | LEIKRADAAPTVSIFPPSSEQLTSGGASVVCFLNNFYPKDINVKWKIDGSERQN | |
| | GVLNSWTDQDSKDSTYSMSSTLTLTKDEYERHNSYTCEATHKTSTSPIVKSFN | |
| | RNEC | |

[0759] Changes were made in the sequences for the preparation of bispecific antibodies (Table 3). The changes include the following: (1) a framework mutation Asn1 of the heavy chain was not conserved, so the sequence has been modified to have the DVQLW sequence; (2) another mutation identified in the Fc, K337Y, was deemed uncharacteristic, and, thus, a construct without this mutation was synthesized; and (3) a potential secondary glycosylation site on the heavy chain was observed, and, thus, two versions of this mAb with and without the N-linked site

TABLE 3
Heavy and Light Chain sequences for Vβ17 clone E17.5F
antibody variants

| | | SEQ |
|---|---|---|
| mAb | | ID |
| ID | Heavy Chain Amino Acid Sequence | NO: |
| B17B1 | NVQLQESGPGLVKPSQSLSLTCSVAGYSITSGYFWNWIRQFPGNKLEWMGYIS | 9 |
| | YDGSNNYNPSLKNRISITRDTSKNQFFLKLNSVTTEDTATYYCASPSPGTGYAV | |
| | DYWGQGTSVTVSSASTKGPSVFPLAPCSRSTSESTAALGCLVKDYFPEPVTVS | |
| | WNSGALTSGVHTFPAVLQSSGLYSLSSVVTVPSSSLGTKTYTCNVDHKPSNTK | |
| | VDKRVESKYGPPCPPCPAPEAAGGPSVFLFPPKPKDTLMISRTPEVTCVVVDVS | |
| | QEDPEVQFNWYVDGVEVHNAKTKPREEQFNSTYRVVSVLTVLHQDWLNGKE | |
| | YKCKVSNKGLPSSIEKTISKAKGQPREPQVYTLPPSQEEMTKNQVSLTCLVKGF | |
| | YPSDIAVEWESNGQPENNYKTTPPVLDSDGSFLLYSKLTVDKSRWQEGNVFSC | |
| | SVMHEALHNHYTQKSLSLSLGK | |
| B17B2 | DVQLKESGPGLVKPSQSLSVTCSVTGYSITSGYYWNWYRQFPGNKLEWMGYI | 11 |
| | SYDGSNNYNPSLKNRISITRDTSKNQILLKLTYVTTEDTATYYCTRPSPGTGYA | |
| | VDYWGQGTLVTVSSASTKGPSVFPLAPCSRSTSESTAALGCLVKDYFPEPVTVS | |
| | WNSGALTSGVHTFPAVLQSSGLYSLSSVVTVPSSSLGTKTYTCNVDHKPSNTK | |
| | VDKRVESKYGPPCPPCPAPEAAGGPSVFLFPPKPKDTLMISRTPEVTCVVVDVS | |
| | QEDPEVQFNWYVDGVEVHNAKTKPREEQFNSTYRVVSVLTVLHQDWLNGKE | |
| | YKCKVSNKGLPSSIEKTISKAKGQPREPQVYTLPPSQEEMTKNQVSLTCLVKGF | |
| | YPSDIAVEWESNGQPENNYKTTPPVLDSDGSFLLYSKLTVDKSRWQEGNVFSC | |
| | SVMHEALHNHYTQKSLSLSLGK | |
| | | SEQ |
| | | ID |
| | Light Chain Amino Acid Sequence | NO: |
| B17B1 | NVVMTQTPLSLPVSLGDQASISCRSSQSLVHSNGNTYLHWYLQKPGQSPKFLIY | 10 |
| | KVSNRFSGVPDRFSGGGSGTEFTLKISRVEAEDLGVYFCSQSTHVPFTFGSGTK | |
| | LEIKRADAAPTVSIFPPSSEQLTSGGASVVCFLNNFYPKDINVKWKIDGSERQN | |
| | GVLNSWTDQDSKDSTYSMSSTLTLTKDEYERHNSYTCEATHKTSTSPIVKSFN | |
| | RNEC | |
| B17B2 | DIVMTQSPDSLAVSLGERATINCRSSQSLVHSNGNTYLHWYQQKPGQPPKLLI | 12 |
| | YKVSNRFSGVPDRFSGSGSGTDFTLTISSLQAEDVAVYYCSQSTHVPFTFGQGT | |
| | KVEIKRADAAPTVSIFPPSSEQLTSGGASVVCFLNNFYPKDINVKWKIDGSERQ | |
| | NGVLNSWTDQDSKDSTYSMSSTLTLTKDEYERHNSYTCEATHKTSTSPIVKSF | |
| | NRNEC | |

[0760] The two antibodies (B17B1 and B17B2) were expressed in HEK293Expi cells. The supernatants were tested for Vβ17 binding (B17B1 and B17B2) and only B17B1 demonstrated binding. Thus, B17B1 was expressed having an IgG4 constant region with Fc substitutions.

[0761] The anti-human TCR Vβ17 mouse mAb B17B1 was humanized using the Human Framework Adaptation (HFA) method (Fransson J, et al. J. Mol. Biol. 2010; 398:214-231). To find the best combination of humanized heavy and light chains, several human V-region sequences were selected for testing (Table 4). Selection of human germlines was based solely on the overall sequence similarity to the mouse antibody in the framework (FR) region. Neither the CDR sequences, nor their length or canonical structures, were considered in this selection.

[0762] The CDR definition used in HFA is described in (Fransson J, et al. J. Mol. Biol. 2010; 398:214-231) and corresponds to the Martin's definition (Abhinandan K R and Martin A C. Mol. Immunol. 2008; 45:3832-3839). The CDRs (Table 1) were defined as described below (using the Chothia numbering scheme [Chothia C, and Lesk A. J. Mol. Biol. 1987; 196:901-917]):

| | |
|---|---|
| HCDR1 (SEQ ID NO: 1) | 26-35 |
| HCDR2 (SEQ ID NO: 2) | 50-58 |
| HCDR3 (SEQ ID NO: 3) | 95-102 |
| LCDR1 (SEQ ID NO: 4) | 24-34 |
| LCDR2 (SEQ ID NO: 5) | 50-56 |
| LCDR3 (SEQ ID NO: 6) | 89-97 |

[0763] The selected human germlines are provided in Table 4 (in the IMGT notation).

TABLE 4
VH and VL variants

| | | SEQ ID |
|---|---|---|
| | Sequence | NO: |
| Ab VH | | |
| B17H1 | NVQLQESGPGLVKPSQSLSLTCSVAGYSITSGYFWNWIRQFP | 25 |
| | GNKLEWMGYISYDGSNNYNPSLKNRISITRDTSKNQFFLKL | |
| | NSVTTEDTATYYCASPSPGTGYAVDYWGQGTSVTVSS | |
| B17H3 | EVQLLESGGGLVQPGGSLRLSCAASGYSITSGYFWNWVRQ | 19 |
| | APGKGLEWVSYISYDGSNNYADSVKGRFTISRDNSKNTLYL | |
| | QMNSLRAEDTAVYYCAKPSPGTGYAVDYWGQGTLVTVSS | |
| B17H4 | EVQLLESGGGLVQPGGSLRLSCAASGYSITSGYFWNWVRQ | 20 |
| | APGKGLEWVSYISYDGSNNYADSVKGRFTISRDNSKNTLYL | |
| | QMNSLRAEDTAVYYCASPSPGTGYAVDYWGQGTLVTVSS | |
| B17H5 | QVQLQESGPGLVKPSETLSLTCTVSGYSITSGYFWNWIRQPP | 21 |
| | GKGLEWIGYISYDGSNNYNPSLKSRVTISRDTSKNQFSLKLS | |
| | SVTAADTAVYYCASPSPGTGYAVDYWGQGTLVTVSS | |
| Ab VL | | |
| B17L1 | NVVMTQTPLSLPVSLGDQASISCRSSQSLVHSNGNTYLHWY | 26 |
| | LQKPGQSPKFLIYKVSNRFSPGVPDRFSGGGSGTEFTLKISRVE | |
| | AEDLGVYFCSQSTHVPFTFGSGTKLEIK | |
| B17L3 | DIQMTQSPSSLSASVGDRVTITCRSSQSLVHSNGNTYLHWY | 22 |
| | QQKPGKAPKLLIYKVSNRFSGVPSRFSGSGSGTDFTLTISSLQ | |
| | PEDFATYYCSQSTHVPFTFGQGTKLEIK | |
| B17L4 | DIQMTQSPSSLSASVGDRVTITCRSSQSLVHSNGNTYLHWY | 23 |
| | QQKPGKAPKFLIYKVSNRFSGVPSRFSGSGSGTDFTLTISSLQ | |
| | PEDFATYYCSQSTHVPFTFGQGTKLEIK | |
| B17L5 | DVVMTQSPLSLPVTLGQPASISCRSSQSLVHSNGNTYLHWF | 24 |
| | QQRPGQSPRFLIYKVSNRFSGVPDRFSGSGSGTDFTLKISRVE | |
| | AEDVGVYYCSQSTHVPFTFGQGTKLEIK | |

CDRs1-3 are underlined

[0764] “Back mutations” in several variants were introduced at FR positions that are known to be important for VL/VH pairing and CDR conformation. The selected human germlines are provided in Table 5 (in the IMGT notation), with the back mutations noted.

TABLE 5
The selected J-regions

| | | SEQ ID |
|---|---|---|
| J-region | Sequence | NO: |
| IGHJ1*01 HC | WGQGTLVTVSS | 42 |
| IGKJ2*01 LC | FGQGTKLEIK | 43 |

[0765] Amino acid sequences of all nine pairwise combinations of three heavy chains and three light chains were back-translated to DNA, and cDNA was prepared using gene synthesis techniques (U.S. Pat. Nos. 6,670,127; 6,521,427). Heavy chain (HC) variable regions were subcloned onto human IgG4 constant region using an in-house expression vector with the CMV promoter using standard molecular biology techniques. Light chain (LC) variable regions were subcloned onto a human Lambda (λ) constant regions using an in-house expression vector with the CMV promoter using standard molecular biology techniques. Resulting plasmids were transfected into HEK EXPI cells (LifeTechnologies; Carlsbad, Calif.) and mAbs were expressed. Purification was by standard methods using a Protein A column (HITRAP MABSELECT SURE column). After elution, the pools were dialyzed into D-PBS, pH 7.2.

TABLE 6
Heavy and Light chains of nine humanized Vβ17 antibodies

| | | | | | Concentration |
|---|---|---|---|---|---|
| mAh | Hc | SEQ ID NO: | Lc | SEQ ID NO: | (μg/mL) |
| B17B14 | B17H3 | 19 | B17L3 | 22 | 686.3 |
| B17B15 | B17H3 | 19 | B17L4 | 23 | 13.8 |
| B17B16 | B17H3 | 19 | B17L5 | 24 | 14.6 |
| B17B17 | B17H4 | 20 | B17L3 | 22 | 335.1 |
| B17B18 | B17H4 | 20 | B17L4 | 23 | 45.2 |
| B17B19 | B17H4 | 20 | B17L5 | 24 | 27.5 |
| B17B20 | B17H5 | 21 | B17L3 | 22 | 602.1 |
| B17B21 | B17H5 | 21 | B17L4 | 23 | 570.9 |
| B17B22 | B17H5 | 21 | B17L5 | 24 | 320.5 |

[0766] The humanized antibodies were screened for binding to a TCRVβ17 (SEQ ID NO:27)/Va10.2-Fc (SEQ ID NO:44) fusion protein by ELISA. Biotinylated TCRVβ17/Va10.2-Fc fusion protein was added to a streptavidin-coated ELISA plate. Unbound protein was washed away and mAb was added at a range of concentrations (0.01-10 μg/mL). Plates were washed and anti-kappa:HRP detection antibody was added. Plates were washed, chemiluminescent detection reagent was added, and the plates were read on a Perkin Elmer ENVISION plate reader for luminescence. B17B20 and B17B21 showed positive binding to the TCR-Vβ17 protein. B17B22 showed weak binding to this protein. These antibodies were then purified as described above for further studies. B17B21 demonstrated the best binding to recombinant TCR-Vβ17 protein and to M1-stimulated T-cells and was thus chosen as the molecule for further functional studies, specifically T-cell re-directed cancer cell killing as a bispecific antibody.

[0767] Thus, the variable region sequence of B17B21 (anti-Vβ17) and I3RB217 (anti-CD123 antibody) was used to generate a bispecific antibody to be tested for T-cell re-directed killing of acute myeloid leukemia (AML) cells.

### Example 2—Multispecific Antibodies that Bind Vβ17 and BCMA

### Example 2.1: Anti-Vβ17 Antibody Generation

[0768] Immunogen.

[0769] A recombinant human TCR Vβ17×Vα10.2 fused to a human Fc was used as an immunogen, and the sequence is listed in Table 7.

TABLE 7
Amino acid sequence of the immunogen.

| | | | SEQ |
|---|---|---|---|
| | | | ID |
| | Protein ID | “Knob” arm and “hole” arm amino acid sequence | NO: |
| TCR | Vβ17-TRBC2- | VDGGITQSPKYLFRKEGQNVTLSCEQNLNHDAMYWYRQDPGQGLR | 560 |
| Vβ17 × | hFc | LIYYSQIVNDFQKGDIAEGYSVSREKKESFPLTVTSAQKNPTAFY | |
| Vα10.2 | | LCASSSRSSYEQYFGPGTRLTVTEDLKNVFPPEVAVFEPSEAEIS | |
| fused to | | HTQKATLVCLATGFYPDHVELSWWVNGKEVHSGVSTDPQPLKEQP | |
| human Fc | | ALNDSRYSLSSRLRVSATFWQNPRNHFRCQVQFYGLSENDEWTQD | |
| | | RAKPVTQIVSAEAWGRADEPKSCDKTHTCPPCPAPELLGGPSVFL | |
| | | FPPKPKDTLMISRTPEVTCVVVDVSHEDPEVKFNWYVDGVEVHNA | |
| | | KTKPREEQYNSTYRVVSVLTVLHQDWLNGKEYKCKVSNKALPAPI | |
| | | EKTISKAKGQPREPQVYVLPPSREEMTKNQVSLLCLVKGFYPSDI | |
| | | AVEWESNGQPENNYLTWPPVLDSDGSFFLYSKLTVDKSRWQQGNV | |
| | | FSCSVMHEALHNHYTQKSLSLSPGK | |
| | Vα10.2-TRAC- | QLLEQSPQFLSIQEGENLTVYCNSSSVFSSLQWYRQEPGEGPVLL | 561 |
| | hFc | VTVVTGGEVKKLKRLTFQFGDARKDSSLHITAAQPGDTGLYLCAG | |
| | | AGSQGNLIFGKGTKLSVKPNIQNPDPAVYQLRDSKSSDKSVCLFT | |
| | | DFDSQTNVSQSKDSDVYITDKTVLDMRSMDFKSNSAVAWSNKSDF | |
| | | ACANAFNNSIIPEDTFFPSEPKSCDKTHTCPPCPAPELLGGPSVF | |
| | | LFPPKPKDTLMISRTPEVTCVVVDVSHEDPEVKFNWYVDGVEVHN | |
| | | AKTKPREEQYNSTYRVVSVLTVLHQDWLNGKEYKCKVSNKALPAP | |
| | | IEKTISKAKGQPREPQVYVYPPSREEMTKNQVSLTCLVKGFYPSD | |
| | | IAVEWESNGQPENNYKTTPPVLDSDGSFALVSKLTVDKSRWQQGN | |
| | | VFSCSVMHEALHNHYTQKSLSLSPGK | |

[0770] Protein Production of the Immunogen.

[0771] Expression plasmids encoding the immunogen (see Table 7) were transfected into CHO cell at a DNA ratio of 1:1. Total amount of DNA for a 750 mL expression scale was 750 ug. Final expression volume was 1 L after two feedings and enhancer additions. Using an AKTAprime plus instrument (GE Healthcare Life Sciences), supernatant (1 L) after 7 days was applied with a flow-rate of 5 mL/min to a MAB SELECT SURE (GE Life Sciences) with a column volume (CV) of 10 mL pre-equilibrated with Phosphate buffered saline (PBS), pH 6.8. Non-specific proteins binding to the column material was washed off with PBS supplemented with 500 mM NaCl, pH 6.8 (5 CV). The Fc containing the immunogen was eluted stepwise with 40 mM sodium acetate pH 5.0 (5 CV), pH 4.5 (5 CV), pH 4.0 (10 CV), pH 3.5 (5 CV), and pH 3.0 (5 CV). Majority of the target protein eluted at the pH 4.0 step. Fractions were pooled, and applied (5 mL) at a flow-rate of 0.2 mL/min on to a HILOAD 16/600 SUPERDEX (GE Healthcare) column pre-equilibrated with PBS (pH 6.8). Target protein was eluted, pooled, and analyzed by SDS-PAGE, analytic SEC, intact mass by MS. Purity estimated to 99.5%.

[0772] Immunization in Mouse and Screening of Vβ17 Binder.

[0773] Wild type mouse with 6 different MHC combinations was immunized using rapid immunization protocol. Eight mice were selected for cell fusion based on serum titer. Hybridoma supernatants were screened by LUMINEX using the immunogen and expanded Vβ17+ T cells. Hits were V-region recovered and formatted directly into bispecific antibodies.

### Example 2.2: Production and De Novo Sequencing of Anti-BCMA MAB

[0774] An anti-BCMA clone was obtained and sequenced. The three VH CDR and three VL CDR sequences of anti-BCMA (BCMB519) are shown in Table 8 (SEQ ID NOs:89-94, respectively); and the VH and VL sequences of the anti-BCMA antibody are shown in Table 9 (SEQ ID NOs:95 and 96, respectively).

TABLE 8
CDR sequences of anti-BCMA mAb.

| | | SEQ | | SEQ | | SEQ |
|---|---|---|---|---|---|---|
| | | ID | | ID | | ID |
| mAb ID | HCDR1 | NO: | HCDR2 | NO: | HCDR3 | NO: |
| BCMB519 | GFTFSSYA | 89 | ISGSGGST | 90 | AKDEGYSSGHYYGMDV | 91 |
| | | SEQ | | SEQ | | SEQ |
| | | ID | | ID | | ID |
| mAb ID | LCDR1 | NO: | LCDR2 | NO: | LCDR3 | NO: |
| BCMB519 | QSISSSF | 92 | GAS | 93 | QHYGSSPMYT | 94 |

TABLE 9
VH and VL sequences of anti-BCMA mAb.

| | | SEQ |
|---|---|---|
| | | ID |
| mAb ID | VH Amino Acid Sequence | NO: |
| BCMB519 | EVQLLESGGGLVQPGGSLRLSCAASGFTFSSYAMSWVRQAPGKGLE | 95 |
| | WVSAISGSGGSTYYADSVKGRFTISRDNSKNTLYLQMNSLRAEDTAV | |
| | YYCAKDEGYSSGHYYGMDVWGQGTTVTVSS | |
| | | SEQ |
| | | ID |
| mAb ID | VL Amino Acid Sequence | NO: |
| BCMB519 | EIVLTQSPGTLSLSPGERATLSCRASQSISSSFLTWYQQKPGQAPRLLIY | 96 |
| | GASSRATGIPDRFSGGGSGTDFTLTISRLEPEDFAVYYCQHYGSSPMYT | |
| | FGQGTKLEIK | |

### Example 2.3: Preparation of Anti-Vβ17/Anti-BCMA Bispecific Antibodies

[0775] All the bispecific antibodies were produced as full-length antibodies in the knob-into-hole format as human IgG1, as previously described (Atwell et al. J. Mol. Biol. 270: 26-35, 1997). Nucleic acid sequences encoding variable regions were subcloned into a custom mammalian expression vectors containing constant region of IgG1 Fc silent expression cassettes using standard PCR restriction enzyme based cloning techniques. The bispecific antibodies were expressed by transient transfection in Chinese hamster ovary cell line.

[0776] The sequences of the bispecific antibodies expressed in the CHO cells are shown in Table 10 below.

TABLE 10
Sequences of antibodies expressed in CHO cells

| | | | SEQ |
|---|---|---|---|
| Bispecific | | | ID |
| Antibody | Chain info | Amino Acid Sequence | NO: |
| Vb17 × | Heavy Chain 1 | MAWVWTLLFLMAAAQSIQAQVQLKESGPGLVAPSQSLSITCT | 562 |
| BCMA | Vb17_202B4D1 | VSGFSLTSYGVIIWVRQPPGKGLEWLGIIWAGGGTNYNSALMS | |
| (B17B622) | | RLSITKDNSKSQVSLKMNSLQTDDTAMYYCARGTFFNYDYFD | |
| | | YWGQGTTLTVSSASTKGPSVFPLAPSSKSTSGGTAALGCLVKD | |
| | | YFPEPVTVSWNSGALTSGVHTFPAVLQSSGLYSLSSVVTVPSSS | |
| | | LGTQTYICNVNHKPSNTKVDKKVEPKSCDKTHTCPPCPAPEAA | |
| | | GGPSVFLFPPKPKDTLMISRTPEVTCVVVSVSHEDPEVKFNWY | |
| | | VDGVEVHNAKTKPREEQYNSTYRVVSVLTVLHQDWLNGKEY | |
| | | KCKVSNKALPAPIEKTISKAKGQPREPQVYVYPPSREEMTKNQ | |
| | | VSLTCLVKGFYPSDIAVEWESNGQPENNYKTTPPVLDSDGSFA | |
| | | LVSKLTVDKSRWQQGNVFSCSVMHEALHNRFTQKSLSLSPG | |
| | Light Chain 1 | MAWVWTLLFLMAAAQSIQADIVMTQSQKFMSTSVGDRVSITC | 563 |
| | Vb17_202B4D1 | KASQDVGTDVAWYQQKPGQSPKLMIYWASTRHTGVPDRFTG | |
| | | SGSGTDFTLTISNVQSEDLADYFCQQYSRYPWTFGAGTKLELK | |
| | | RTVAAPSVFIFPPSDEQLKSGTASVVCLLNNFYPREAKVQWKV | |
| | | DNALQSGNSQESVTEQDSKDSTYSLSSTLTLSKADYEKHKVYA | |
| | | CEVTHQGLSSPVTKSFNRGEC | |
| | Heavy Chain 2 | MAWVWTLLFLMAAAQSIQAEIVLTQSPGTLSLSPGERATLSCR | 559 |
| | BCMB519 | ASQSISSSFLTWYQQKPGQAPRLLIYGASSRATGIPDRFSGGGS | |
| | | GTDFTLTISRLEPEDFAVYYCQHYGSSPMYTFGQGTKLEIKGGS | |
| | | EGKSSGSGSESKSTGGSEVQLLESGGGLVQPGGSLRLSCAASGF | |
| | | TFSSYAMSWVRQAPGKGLEWVSAISGSGGSTYYADSVKGRFTI | |
| | | SRDNSKNTLYLQMNSLRAEDTAVYYCAKDEGYSSGHYYGMD | |
| | | VWGQGTTVTVSSEPKSSDKTHTCPPCPAPEAAGGPSVFLFPPKP | |
| | | KDTLMISRTPEVTCVVVSVSHEDPEVKFNWYVDGVEVHNAKT | |
| | | KPREEQYNSTYRVVSVLTVLHQDWLNGKEYKCKVSNKALPAP | |
| | | IEKTISKAKGQPREPQVYVLPPSREEMTKNQVSLLCLVKGFYPS | |
| | | DIAVEWESNGQPENNYLTWPPVLDSDGSFFLYSKLTVDKSRW | |
| | | QQGNVFSCSVMHEALHNHYTQKSLSLSPG | |
| Vb17 × | Heavy Chain 1 | MAWVWTLLFLMAAAQSIQAQVQLKESGPVLVAPSQSLSITCT | 564 |
| BCMA | Vb17_210E10A1 | VSGFSLTSYGVHWVRQPPGKGLEWLGIIWAGGNTNSNSALMS | |
| (B17B624) | | RLSISKDNSKSQVFLKMNSLQTDDTAMYYCARGSFYSYLYFDY | |
| | | WGQGTTLTVSSASTKGPSVFPLAPSSKSTSGGTAALGCLVKDY | |
| | | FPEPVTVSWNSGALTSGVHTFPAVLQSSGLYSLSSVVTVPSSSL | |
| | | GTQTYICNVNHKPSNTKVDKKVEPKSCDKTHTCPPCPAPEAAG | |
| | | GPSVFLFPPKPKDTLMISRTPEVTCVVVSVSHEDPEVKFNWYV | |
| | | DGVEVHNAKTKPREEQYNSTYRVVSVLTVLHQDWLNGKEYK | |
| | | CKVSNKALPAPIEKTISKAKGQPREPQVYVYPPSREEMTKNQV | |
| | | SLTCLVKGFYPSDIAVEWESNGQPENNYKTTPPVLDSDGSFAL | |
| | | VSKLTVDKSRWQQGNVFSCSVMHEALHNRFTQKSLSLSPG | |
| | Light Chain 1 | MAWVWTLLFLMAAAQSIQADIVMTQSPSYLAASPGETITINCR | 565 |
| | Vb17_210E10A1 | ASKSISKYLAWYQEKPGKTNKLLIYSGSTLQSGIPSRFSGSGSGT | |
| | | DFTLTISSLEPEDFAMYYCQQHNDYPLTFGAGTKLELKRTVAA | |
| | | PSVFIFPPSDEQLKSGTASVVCLLNNFYPREAKVQWKVDNALQ | |
| | | SGNSQESVTEQDSKDSTYSLSSTLTLSKADYEKHKVYACEVTH | |
| | | QGLSSPVTKSFNRGEC | |
| | Heavy Chain 2 | MAWVWTLLFLMAAAQSIQAEIVLTQSPGTLSLSPGERATLSCR | 559 |
| | BCMB519 | ASQSISSSFLTWYQQKPGQAPRLLIYGASSRATGIPDRFSGGGS | |
| | | GTDFTLTISRLEPEDFAVYYCQHYGSSPMYTFGQGTKLEIKGGS | |
| | | EGKSSGSGSESKSTGGSEVQLLESGGGLVQPGGSLRLSCAASGF | |
| | | TFSSYAMSWVRQAPGKGLEWVSAISGSGGSTYYADSVKGRFTI | |
| | | SRDNSKNTLYLQMNSLRAEDTAVYYCAKDEGYSSGHYYGMD | |
| | | VWGQGTTVTVSSEPKSSDKTHTCPPCPAPEAAGGPSVFLFPPKP | |
| | | KDTLMISRTPEVTCVVVSVSHEDPEVKFNWYVDGVEVHNAKT | |
| | | KPREEQYNSTYRVVSVLTVLHQDWLNGKEYKCKVSNKALPAP | |
| | | IEKTISKAKGQPREPQVYVLPPSREEMTKNQVSLLCLVKGFYPS | |
| | | DIAVEWESNGQPENNYLTWPPVLDSDGSFFLYSKLTVDKSRW | |
| | | QQGNVFSCSVMHEALHNHYTQKSLSLSPG | |
| Null × | Heavy Chain 1 | MAWVWTLLFLMAAAQSIQAQITLKESGPTLVKPTQTLTLTCTF | 566 |
| BCMA | B21M | SGFSLSTSGMGVSWIRQPPGKALEWLAHIYWDDDKRYNPSLKS | |
| (B17B612) | | RLTITKDTSKNQVVLTMTNMDPVDTATYYCARLYGFTYGFAY | |
| | | WGQGTLVTVSSASTKGPSVFPLAPSSKSTSGGTAALGCLVKDY | |
| | | FPEPVTVSWNSGALTSGVHTFPAVLQSSGLYSLSSVVTVPSSSL | |
| | | GTQTYICNVNHKPSNTKVDKKVEPKSCDKTHTCPPCPAPEAAG | |
| | | GPSVFLFPPKPKDTLMISRTPEVTCVVVSVSHEDPEVKFNWYV | |
| | | DGVEVHNAKTKPREEQYNSTYRVVSVLTVLHQDWLNGKEYK | |
| | | CKVSNKALPAPIEKTISKAKGQPREPQVYVYPPSREEMTKNQV | |
| | | SLTCLVKGFYPSDIAVEWESNGQPENNYKTTPPVLDSDGSFAL | |
| | | VSKLTVDKSRWQQGNVFSCSVMHEALHNRFTQKSLSLSPG | |
| | Light Chain 1 | METHSQVFVYMLLWLSGVEGDIVMTQSPDSLAVSLGERATINC | 567 |
| | B21M | RASQSVDYNGISYMHWYQQKPGQPPKLLIYAASNPESGVPDRF | |
| | | SGSGSGTDFTLTISSLQAEDVAVYYCQQIIEDPWTFGQGTKVEI | |
| | | KRTVAAPSVFIFPPSDEQLKSGTASVVCLLNNFYPREAKVQWK | |
| | | VDNALQSGNSQESVTEQDSKDSTYSLSSTLTLSKADYEKHKVY | |
| | | ACEVTHQGLSSPVTKSFNRGEC | |
| | Heavy Chain 2 | MAWVWTLLFLMAAAQSIQAEIVLTQSPGTLSLSPGERATLSCR | 559 |
| | BCMB519 | ASQSISSSFLTWYQQKPGQAPRLLIYGASSRATGIPDRFSGGGS | |
| | | GTDFTLTISRLEPEDFAVYYCQHYGSSPMYTFGQGTKLEIKGGS | |
| | | EGKSSGSGSESKSTGGSEVQLLESGGGLVQPGGSLRLSCAASGF | |
| | | TFSSYAMSWVRQAPGKGLEWVSAISGSGGSTYYADSVKGRFTI | |
| | | SRDNSKNTLYLQMNSLRAEDTAVYYCAKDEGYSSGHYYGMD | |
| | | VWGQGTTVTVSSEPKSSDKTHTCPPCPAPEAAGGPSVFLFPPKP | |
| | | KDTLMISRTPEVTCVVVSVSHEDPEVKFNWYVDGVEVHNAKT | |
| | | KPREEQYNSTYRVVSVLTVLHQDWLNGKEYKCKVSNKALPAP | |
| | | IEKTISKAKGQPREPQVYVLPPSREEMTKNQVSLLCLVKGFYPS | |
| | | DIAVEWESNGQPENNYLTWPPVLDSDGSFFLYSKLTVDKSRW | |
| | | QQGNVFSCSVMHEALHNHYTQKSLSLSPG | |

ScFv Sequences

| | | | |
|---|---|---|---|
| B17B621 | Heavy Chain 1 | MAWVWTLLFLMAAAQSIQAQVQLQQSGPELVKPGASVKMSC | 568 |
| ZWA: | Va10.2- | KASGNTIPTYVMHWVKLKPGQGLEWIGYINPYNDGTKYNEKF | |
| Va10.2- | TRVAB1 | KGKATLTSDKSSSTAYMELSSLTSEDSAVYYCAKDGTYVEFAY | |
| TRVAB1- | | WGQGTLVTVSAASTKGPSVFPLAPSSKSTSGGTAALGCLVKDY | |
| Fab-RF | | FPEPVTVSWNSGALTSGVHTFPAVLQSSGLYSLSSVVTVPSSSL | |
| ZWB: | | GTQTYICNVNHKPSNTKVDKKVEPKSCDKTHTCPPCPAPEAAG | |
| BCMB519- | | GPSVFLFPPKPKDTLMISRTPEVTCVVVSVSHEDPEVKFNWYV | |
| scFv | | DGVEVHNAKTKPREEQYNSTYRVVSVLTVLHQDWLNGKEYK | |
| | | CKVSNKALPAPIEKTISKAKGQPREPQVYVYPPSREEMTKNQV | |
| | | SLTCLVKGFYPSDIAVEWESNGQPENNYKTTPPVLDSDGSFAL | |
| | | VSKLTVDKSRWQQGNVFSCSVMHEALHNRFTQKSLSLSPG | |
| | Light Chain 1 | MAWVWTLLFLMAAAQSIQADIVMTQSRKFMSTSVGDRVNITC | 569 |
| | Va10.2- | KASQNIRTAVAWFQQRPGQSPKLLFYLASNRHTGVPDRFTGSG | |
| | TRVAB1 | SGTDFTLTINDVQSEDLADYFCLQHWNYPYTFGSGTKLEMKRT | |
| | | VAAPSVFIFPPSDEQLKSGTASVVCLLNNFYPREAKVQWKVDN | |
| | | ALQSGNSQESVTEQDSKDSTYSLSSTLTLSKADYEKHKVYACE | |
| | | VTHQGLSSPVTKSFNRGEC | |
| | Heavy Chain 2 | MAWVWTLLFLMAAAQSIQAEIVLTQSPGTLSLSPGERATLSCR | 559 |
| | BCMB519 | ASQSISSSFLTWYQQKPGQAPRLLIYGASSRATGIPDRFSGGGS | |
| | | GTDFTLTISRLEPEDFAVYYCQHYGSSPMYTFGQGTKLEIKGGS | |
| | | EGKSSGSGSESKSTGGSEVQLLESGGGLVQPGGSLRLSCAASGF | |
| | | TFSSYAMSWVRQAPGKGLEWVSAISGSGGSTYYADSVKGRFTI | |
| | | SRDNSKNTLYLQMNSLRAEDTAVYYCAKDEGYSSGHYYGMD | |
| | | VWGQGTTVTVSSEPKSSDKTHTCPPCPAPEAAGGPSVFLFPPKP | |
| | | KDTLMISRTPEVTCVVVSVSHEDPEVKFNWYVDGVEVHNAKT | |
| | | KPREEQYNSTYRVVSVLTVLHQDWLNGKEYKCKVSNKALPAP | |
| | | IEKTISKAKGQPREPQVYVLPPSREEMTKNQVSLLCLVKGFYPS | |
| | | DIAVEWESNGQPENNYLTWPPVLDSDGSFFLYSKLTVDKSRW | |
| | | QQGNVFSCSVMHEALHNHYTQKSLSLSPG | |
| B17B627 | Heavy Chain 1 | MAWVWTLLFLMAAAQSIQAEVQLQQSGPELVKPGASVKMSC | 570 |
| ZWA: | Va10.2- | KASGYTFTRYVIHWMKQKPGQGLEWIGYVNPYNNGTKYTEKF | |
| Va10.2- | TRVAB2 | KGKATLTSDKSSSTAYMELNSLTSEDSAVYYCARPRLSGEDAM | |
| TRVAB2- | | EYWGQGTSVTVSSASTKGPSVFPLAPSSKSTSGGTAALGCLVK | |
| Fab-RF | | DYFPEPVTVSWNSGALTSGVHTFPAVLQSSGLYSLSSVVTVPSS | |
| ZWB: | | SLGTQTYICNVNHKPSNTKVDKKVEPKSCDKTHTCPPCPAPEA | |
| BCMB519- | | AGGPSVFLFPPKPKDTLMISRTPEVTCVVVSVSHEDPEVKFNW | |
| scFv | | YVDGVEVHNAKTKPREEQYNSTYRVVSVLTVLHQDWLNGKE | |
| | | YKCKVSNKALPAPIEKTISKAKGQPREPQVYVYPPSREEMTKN | |
| | | QVSLTCLVKGFYPSDIAVEWESNGQPENNYKTTPPVLDSDGSF | |
| | | ALVSKLTVDKSRWQQGNVFSCSVMHEALHNRFTQKSLSLSPG | |
| | Light Chain 1 | MAWVWTLLFLMAAAQSIQADIQMTQSPKSMSMSVGERVTLT | 571 |
| | Va10.2- | CKASENVVTYVSWYQQKPEQSPKLLIYGASNRYTGVPDRFTGS | |
| | TRVAB2 | GSATDFTLTISSVQAEDLAEYHCGQSHSFPYTFGSGTKLELKRT | |
| | | VAAPSVFIFPPSDEQLKSGTASVVCLLNNFYPREAKVQWKVDN | |
| | | ALQSGNSQESVTEQDSKDSTYSLSSTLTLSKADYEKHKVYACE | |
| | | VTHQGLSSPVTKSFNRGEC | |
| | Heavy Chain 2 | MAWVWTLLFLMAAAQSIQAEIVLTQSPGTLSLSPGERATLSCR | 559 |
| | BCMB519 | ASQSISSSFLTWYQQKPGQAPRLLIYGASSRATGIPDRFSGGGS | |
| | | GTDFTLTISRLEPEDFAVYYCQHYGSSPMYTFGQGTKLEIKGGS | |
| | | EGKSSGSGSESKSTGGSEVQLLESGGGLVQPGGSLRLSCAASGF | |
| | | TFSSYAMSWVRQAPGKGLEWVSAISGSGGSTYYADSVKGRFTI | |
| | | SRDNSKNTLYLQMNSLRAEDTAVYYCAKDEGYSSGHYYGMD | |
| | | VWGQGTTVTVSSEPKSSDKTHTCPPCPAPEAAGGPSVFLFPPKP | |
| | | KDTLMISRTPEVTCVVVSVSHEDPEVKFNWYVDGVEVHNAKT | |
| | | KPREEQYNSTYRVVSVLTVLHQDWLNGKEYKCKVSNKALPAP | |
| | | IEKTISKAKGQPREPQVYVLPPSREEMTKNQVSLLCLVKGFYPS | |
| | | DIAVEWESNGQPENNYLTWPPVLDSDGSFFLYSKLTVDKSRW | |
| | | QQGNVFSCSVMHEALHNHYTQKSLSLSPG | |

[0777] The antibodies were initially purified by Mab Select SuRe Protein A column (GE healthcare, Piscataway, N.J.) (Brown, Bottomley et al. 1998). The column was equilibrated with Phosphate Buffer Saline (PBS), pH 7.2 and loaded with fermentation supernatant at a flow rate of 2 mL/min. After loading, the column was washed with PBS (4 CV) followed by elution in 30 mM sodium acetate, pH 3.5. Fractions containing protein peaks as monitored by Absorbance at 280 nm in AKTA Explorer (GE healthcare) were pooled together and were neutralized to pH 5.0 by adding 100 of 3 M sodium acetate, pH 9.0. As a polishing step, the antibodies were purified on a preparative size exclusion chromatography (SEC) using a SUPERDEX 200 column (GE healthcare). The integrity of the sample was assessed by endotoxin measurement and SDS polyacrylamide gel electrophoresis under reducing and non-reducing conditions. The intact mass was confirmed by mass spectrometry.

TABLE 11
Anti-Vβ17 and Anti-BCMA Heavy and Light Chain Sequences

| | | | SEQ |
|---|---|---|---|
| | | | ID |
| mAb name | Chain info | Amino Acid Sequence | NO: |
| B17B663 | Heavy Chain | MAWVWTLLFLMAAAQSIQADVQLQESGPGLVAPSQSLS | 572 |
| | | ITCTVSGFSLSSYAISWVRQPPGKGLEWLGVIWAGGGTN | |
| | | YNSALKSRLSISKDNSKSQVFLKMKSLQTDDTARYYCAR | |
| | | NFFYDYDDGMDYWGQGTTVTVSSASTKGPSVFPLAPSS | |
| | | KSTSGGTAALGCLVKDYFPEPVTVSWNSGALTSGVHTFP | |
| | | AVLQSSGLYSLSSVVTVPSSSLGTQTYICNVNHKPSNTKV | |
| | | DKKVEPKSCDKTHTCPPCPAPELLGGPSVFLFPPKPKDTL | |
| | | MISRTPEVTCVVVDVSHEDPEVKFNWYVDGVEVHNAKT | |
| | | KPREEQYNSTYRVVSVLTVLHQDWLNGKEYKCKVSNK | |
| | | ALPAPIEKTISKAKGQPREPQVYTLPPSREEMTKNQVSLT | |
| | | CLVKGFYPSDIAVEWESNGQPENNYKTTPPVLDSDGSFF | |
| | | LYSKLTVDKSRWQQGNVFSCSVMHEALHNHYTQKSLSL | |
| | | SPGK | |
| | Light Chain | MARSALLILALLLLGLFSPGAWGNTQMNQTPLSLPVSLG | 573 |
| | | DQASISCRSSQSLVHSNGNTYLHWYLQKPGQSPKLLIYK | |
| | | VSNRFSGVPDRFSGSGSGTDFTLKINRVEAEDLGVYFCSQ | |
| | | STHVPLTFGAGTRLEIKRTVAAPSVFIFPPSDEQLKSGTAS | |
| | | VVCLLNNFYPREAKVQWKVDNALQSGNSQESVTEQDSK | |
| | | DSTYSLSSTLTLSKADYEKHKVYACEVTHQGLSSPVTKS | |
| | | FNRGEC | |
| B17B694 | Heavy Chain | MAWVWTLLFLMAAAQSIQAQIQLVQSGPELKKPGETVK | 574 |
| | | ISCKASGYTFTNYGMNWVKQAPGKGLKWMGWINTYTG | |
| | | EPTYADDFKGRFAFSLETSASTAYLQINNLKNEDMATYF | |
| | | CARPYFGDYAMDYWGQGTLVTVSAASTKGPSVFPLAPS | |
| | | SKSTSGGTAALGCLVKDYFPEPVTVSWNSGALTSGVHTF | |
| | | PAVLQSSGLYSLSSVVTVPSSSLGTQTYICNVNHKPSNTK | |
| | | VDKKVEPKSCDKTHTCPPCPAPELLGGPSVFLFPPKPKDT | |
| | | LMISRTPEVTCVVVDVSHEDPEVKFNWYVDGVEVHNAK | |
| | | TKPREEQYNSTYRVVSVLTVLHQDWLNGKEYKCKVSN | |
| | | KALPAPIEKTISKAKGQPREPQVYTLPPSREEMTKNQVSL | |
| | | TCLVKGFYPSDIAVEWESNGQPENNYKTTPPVLDSDGSF | |
| | | FLYSKLTVDKSRWQQGNVFSCSVMHEALHNHYTQKSLS | |
| | | LSPGK | |
| | Light Chain | MARSALLILALLLLGLFSPGAWGDVQMIQSPASLSVSVG | 575 |
| | | ETVTITCRASENIYSNLAWYQQKQGKSPQVLVYTATNLA | |
| | | DGVPSRFSGSGSGTQYSLKINSLQSEDFGSYYCQHFWGN | |
| | | PWTFGGGTKLEIKRTVAAPSVFIFPPSDEQLKSGTASVVC | |
| | | LLNNFYPREAKVQWKVDNALQSGNSQESVTEQDSKDST | |
| | | YSLSSTLTLSKADYEKHKVYACEVTHQGLSSPVTKSFNR | |
| | | GEC | |
| B17B698 | Heavy Chain | MAWVWTLLFLMAAAQSIQAQVQLQQSGPGLVAPSQSLS | 576 |
| | | ITCTVSGFSLTSYAISWIRQPPGKGLEWLGIIWAGGGTNY | |
| | | NSALKSRLSISKDNSKSQVFLKMNSLQIDDTARYYCARN | |
| | | PFYDYDEGLDYWGQGTTLTVSSASTKGPSVFPLAPSSKS | |
| | | TSGGTAALGCLVKDYFPEPVTVSWNSGALTSGVHTFPA | |
| | | VLQSSGLYSLSSVVTVPSSSLGTQTYICNVNHKPSNTKVD | |
| | | KKVEPKSCDKTHTCPPCPAPELLGGPSVFLFPPKPKDTLM | |
| | | ISRTPEVTCVVVDVSHEDPEVKFNWYVDGVEVHNAKTK | |
| | | PREEQYNSTYRVVSVLTVLHQDWLNGKEYKCKVSNKA | |
| | | LPAPIEKTISKAKGQPREPQVYTLPPSREEMTKNQVSLTC | |
| | | LVKGFYPSDIAVEWESNGQPENNYKTTPPVLDSDGSFFL | |
| | | YSKLTVDKSRWQQGNVFSCSVMHEALHNHYTQKSLSLS | |
| | | PGK | |
| | Light Chain | MARSALLILALLLLGLFSPGAWGDIVMTQSPLSLPVSLGD | 577 |
| | | QASISCRSSQSLVHSNGNTYLHWYLQKPGQSPKLLIYKV | |
| | | SNRFSGVPDRFSGSGSGTDFTLKISRVEAEDLGVYFCSQS | |
| | | THVPWTFGGGTKLEIKRTVAAPSVFIFPPSDEQLKSGTAS | |
| | | VVCLLNNFYPREAKVQWKVDNALQSGNSQESVTEQDSK | |
| | | DSTYSLSSTLTLSKADYEKHKVYACEVTHQGLSSPVTKS | |
| | | FNRGEC | |
| B17B733 | Heavy Chain | MAWVWTLLFLMAAAQSIQAQVQLKESGPVLVAPSQSLS | 578 |
| | | ITCTVSGFSLTSYGVHWIRQPPGKGLEWLGVIWAGGNTN | |
| | | YNSTLMSRLSISKDNSKSQVFLKMNSLQTDDTAMYYCA | |
| | | RGSFYDYLYFDYWGQGTTLTVSSASTKGPSVFPLAPSSK | |
| | | STSGGTAALGCLVKDYFPEPVTVSWNSGALTSGVHTFPA | |
| | | VLQSSGLYSLSSVVTVPSSSLGTQTYICNVNHKPSNTKVD | |
| | | KKVEPKSCDKTHTCPPCPAPELLGGPSVFLFPPKPKDTLM | |
| | | ISRTPEVTCVVVDVSHEDPEVKFNWYVDGVEVHNAKTK | |
| | | PREEQYNSTYRVVSVLTVLHQDWLNGKEYKCKVSNKA | |
| | | LPAPIEKTISKAKGQPREPQVYTLPPSREEMTKNQVSLTC | |
| | | LVKGFYPSDIAVEWESNGQPENNYKTTPPVLDSDGSFFL | |
| | | YSKLTVDKSRWQQGNVFSCSVMHEALHNHYTQKSLSLS | |
| | | PGK | |
| | Light Chain | MARSALLILALLLLGLFSPGAWGDIQMTQSPSYLAASPG | 579 |
| | | ETITINCRASKSISKYLAWYQEKPGKTNELLIYSGSTLQSG | |
| | | IPSRFSGSGSGTDFTLTISSLEPEDFAMYYCQQHNEYPLTF | |
| | | GGGTKLEIKRTVAAPSVFIFPPSDEQLKSGTASVVCLLNN | |
| | | FYPREAKVQWKVDNALQSGNSQESVTEQDSKDSTYSLS | |
| | | STLTLSKADYEKHKVYACEVTHQGLSSPVTKSFNRGEC | |

### Example 2.4: Evaluation of Binding and Cytotoxic Properties of the Anti-Vβ17/Anti-BCMA Bispecific Antibody Using H929 Cells and Human T Cells

[0778] The VB17 antibody (Vb17_202B4D1-Fab-RF, BCMB519-scFv (B17B622.001)) binds T cells and mediates T cell cytotoxicity against BCMA expressing H929 cells in vitro (data not shown). The VB17 antibody (Vb17_210E10A1-Fab-RF, BCMB519-scFv (B17B624.001)) binds T cells and mediates T cell cytotoxicity against BCMA expressing H929 cells in vitro (data not shown). The control antibody (B21M-Fab-RF×BCMB519-LH-scFv (B17B612.001)) does not bind T cells or mediate T cell cytotoxicity against BCMA expressing H929 cells in vitro (data not shown). EC₅₀ values were calculated as described in methods. Representative data shown in these figures are from a single experiment. For the binding assays, αβ-enriched T cells were used, and samples incubated for 1 hour at 37° C. prior to measurements. For the killing assays, human pan T cells (effectors) were co-cultured with H929 at 5:1 E:T ratios in the presence of various concentrations of the bispecific antibody for 72 hours at 37° C. Bispecific constructs were tested in 11-point titration curve with a 3-fold dilution series starting at 50 nM antibody concentration. Human pan T cells were used as effector cells. H929-WT tumor cell line was used as target cells. Dose response curves show anti-Vβ17/anti-BCMA bispecific mediated T cell cytotoxicity against BCMA expressing H929 cells in a dose dependent manner.

### Example 3: Preparation of Anti-Vβ17/Anti-BCMA/Anti-CD28 Trispecific Antibodies

### Example 3.1: Materials and Methods

[0779] Anti-CD28 antibody generation.

[0780] OMNIRATS were immunized twice weekly with recombinant human CD28 (R&D Systems, Inc., MN, USA; Catalog #: 342-CD-200; LOT #: XT321505A) for a total of 12 immunization boosts by following a Repetitive Immunizations Multiple Sites (RIMMS) protocol. Sera was collected and assessed for circulating IgG specific antibodies to CD28 and titers were determined via a solid phase Elisa with antigen being coated directly on the plate. Lymph nodes were harvested for B lymphocytes fusion. Hybridoma supernatants were screened by LUMINEX using the immunogen and expanded pan-T cells. Hits were V-region recovered and formatted human IgG1 antibody.

[0781] Cell Culture.

[0782] NCI-H929 myeloma cells were cultured in RPMI-1640 Medium (A1049101, Thermofisher) containing fetal bovine serum (10099-141, Gibco) to a final concentration of 20%. Cells were subcultured every 2-3 days by spinning the culture at 1500 rpm for 5 mins at 37° C. Culture supernatant was discarded, and cells were seeded back in fresh media at a density of 0.5-1×106/ml. Frozen PBMCs were obtained from Hemacare. PBMCs were also isolated from fresh blood from normal healthy volunteers from Clinigene after informed consent.

[0783] Binding Assay.

[0784] PBMCs (Donor lot #19054141, Hemacare) were thawed rapidly in a 37° C. water bath and subjected to CD3 T cell isolation using EasySep™ Human T Cell Isolation Kit (17951, Stemcell). Post Pan T cell isolation, 0.1×10⁶ cells were seeded per well of a 96 well V-bottom plate. Cells were stained with the fixable violet live/dead stain (L34955, Thermofisher) for 20 mins on ice in dark according to the manufacturer's protocol. Post staining cells were washed with FACS buffer (PBS+2% FBS) by spinning at 1500 rpm for 5 mins. Supernatant was discarded and cells were suspended in 100 μl the respective antibody dilutions with a starting concentration of 5 μg/ml and 3-fold serial dilutions. Antibody dilutions were prepared in FACS buffer. Cells were incubated with the antibody dilutions for 30 mins at 37° C. At the end of the incubation period, cells were washed twice with FACS buffer as above followed by staining with PE conjugated Goat polyclonal antibody to human IgG (ab98596, Abcam) at a 1:50 dilution in FACS buffer. Cells were incubated with the secondary antibody for 30 mins on ice. At the end of incubation period the cells were washed with FACS buffer as above. Cells were fixed by resuspending in 100 μl BD cytofix buffer (554655, BD Bioscience) and incubated for 20 mins on ice. Cells were pelleted and resuspended in FACS buffer for acquisition on the NOVOCYTE flow cytometer (ACEA Biosciences). For binding assays using the H929 cells, 0.1×10⁶ H929 cells were seeded per well of a 96 well V-bottom plate and stained as above. Samples were analyzed by gating on the live cells and percentage binding was obtained by subtracting the background fluorescence from the secondary only control.

[0785] Agonism Assay.

[0786] Antibody dilutions was prepared in PBS at a starting concentration of 1 μg/ml followed by 4-fold serial dilutions. Wells with no antibody addition were used as negative controls. 100 μl of the antibody dilutions were used to coat 96 well flat bottom cell culture plates with incubation at 37° C. for 2 hours. PBMCs (Donor lots #19054456, 19057652, Hemacare) were thawed and subjected to Pan T cells isolation using the EasySep™ Human T Cell Isolation Kit (17951, Stemcell). Isolated Pan T cells were counted and stained with cell trace violet dye (C34557, Thermofisher) as per the manufacturer's protocol. Antibody coated plates were washed with 200 μl media and 0.3×10⁶ CTV labeled Pan T cells were plated per well. Plates were incubated at 37° C. for 96 hours in a 5% CO2 incubator. At the end of the incubation period, the cells were spun down at 1500 rpm for 5 mins. The 150 μl of cell culture supernatant was collected and stored at −20° C. for cytokine profiling using LUMINEX. The cell pellet was subjected to APC-Cy7 live/dead stain (L10119, Thermofisher). Post live/dead staining the cells were washed with FACS buffer. The pellet was then resuspended in FACS buffer containing Fc block (564220, BD Biosciences) and incubated on ice for 10 mins following which the cells were stained with Brilliant Violet 785™ conjugated CD25 (302638, Biolegend) and PE/Cy7 conjugated CD71 (334112, Biolegend) antibodies and incubated on ice for 30 mins. At the end of incubation period the cells were washed with FACS buffer and the cells were fixed by resuspending in 100 μl BD cytofix buffer (554655, BD bioscience) and incubated for 20 mins on ice. Post fixation, the cells were washed, and the samples were resuspended in FACS buffer and acquired on the NOVOCYTE flow cytometer. Proliferation was monitored by CTV dye. Cells were gated on the live cell population, followed by gating on Vβ17+ T cells and Vβ17− T cells. Expression of CD25, CD71 and CTV dye was monitored on each cell population and plotted as % positive cells against log antibody concentration using a 4-parameter non-linear regression curve.

[0787] Effector Profiling.

[0788] PBMCs (Donors HPU-00284 from Clinigene and donor lot #19054141, 19054456, 20061101 from Hemacare) were thawed and subjected to EasySep™ Human T Cell Isolation Kit (17951, Stemcell). H929 cells were counted and plated at 10,000 cells per well in a 96 well U-bottom plate in 100 μl of media. Isolated Pan T cells were counted and stained with cell trace violet dye (C34557, Thermofisher) as per the manufacturer's protocol. Vβ17 T cell frequency was determined in the Pan T cells from each donor using the PE conjugated TCR Vβ17 antibody (IM2048, Beckman Coulter). CTV labeled Pan T cells were then added to the plated H929 cells such that an effector to target ratio of 1 Vβ17:1 H929 cell was obtained. 80 μl of the effector cell suspension in RPMI media+10% FBS was added per well. For example, the Vβ17 percentage for HPU-00284 was 4.3%, so 0.23×10⁶ cells were plated per well in 80 μl media. 10× concentration of the antibodies were prepared (10 μg/ml) followed by 4-fold serial dilutions in RPMI media+10% FBS. 20 μl of the serially diluted Ab was added to the 180 μl of the co-culture making the final concentration of the antibodies in coculture as 1×. The cell culture plates were incubated at 37° C. for 96 hrs. At the end of the incubation period, the cells were spun down at 1500 rpm for 5 mins. The 150 μl of cell culture supernatant was collected and stored at −20° C. for cytokine profiling by LUMINEX. Cells were stained with APC-Cy7 live/dead stain (L10119, Thermofisher) followed by staining with Fc block (564220, BD Biosciences). The cell pellet was taken for staining with Brilliant Violet 785™ anti-human CD25 (302638, Biolegend), PE/Cy7 anti-human CD71 (334112, Biolegend), BV 650 Anti human TIM3 (345028, Biolegend), Alexa Fluor® 488 anti-human LAG3 (369326, Biolegend), and Brilliant Violet 711 anti-human PD1 antibodies (cat #329928, Biolegend) as per the manufacturer's recommendation. Cells were washed post staining in FACS buffer and fixed with BD cytofix buffer (554655, BD Bioscience). Post fixation, samples were resuspended in FACS buffer and acquired on the NOVOCYTE flow cytometer. Cells were gated on the live cell population, followed by gating on Vβ17+ T cells and Vβ17− T cells. Expression of CD25, CD71, TIM3, LAG3, PD1 and CTV dye was monitored on each cell population and plotted as % positive cells against log antibody concentration using a 4-parameter non-linear regression curve using GRAPHPAD Prism version 8.1.1.

[0789] Luminex Analysis.

[0790] Supernatants from the effector profiling assay were slowly thawed and diluted 1:10 using RPMI media+10% FBS. Cytokine analysis was carried out using the MILLIPLEX MAP Human CD8+ T Cell Magnetic Bead Panel Immunology Multiplex Assay (HCD8MAG-15K, Millipore). Plates were read using the LUMINEX plate reader (Magpix).

[0791] In Vitro Cytotoxicity Assay.

[0792] PBMCs (Donor lots #18047563, 19056279 from Hemacare) were thawed and subjected to Pan T cell isolation using the EasySep™ Human T Cell Isolation Kit (17951, Stemcell). Another set was subjected to Vβ17 depletion using EasySep™ Human PE Positive Selection Kit (18551, Stemcells) followed by Pan T cell isolation. H929 cells were labeled with 0.5 μm of CTV dye (C34557, Thermofisher) as per the manufacturer's protocol, counted and plated at 10,000 cells per well in a 96 well U-bottom plate in 100 μl of RPMI media (ATCC modification)+20% FBS. Vβ17 T cell frequency was determined in the Pan T cells from each donor using the PE conjugated TCR Vβ17 antibody (IM2048, Beckman Coulter). CTV labeled Pan T cells were then added to the plated H929 cells such that an effector to target ratio of 1 Vβ17:1 H929 cell was obtained. 80 μl of the effector cell suspension in RPMI media+10% FBS was added per well. 10× concentration of the antibodies were prepared (10 μg/ml) followed by 4-fold serial dilutions in media. 20 μl of the serially diluted antibody was added to the 180 μl of the co-culture making the final concentration of the antibodies in coculture as 1×. The cell culture plates were incubated at 37° C. for 96 hrs. At the end of the incubation period, the cells were spun down at 1500 rpm for 5 mins. At the end of incubation period, the cells were spun down, 150 μl of cell culture supernatant removed and cells were resuspended in 50 μl of 7AAD (420404, Biolegend) diluted 1:50 in PBS and acquired on the NOVOCYTE flow cytometer. Target cells were identified as CTV positive cells and percentage of dead cells within the target cells was gated as 7AAD+ cells. Antibody specific percentage dead cells were calculated by subtracting the lysis observed in wells containing only Pan T cells and H929 cells. Percentage dead cells were plotted against log concentration of the antibody in a 4-parameter non-linear regression curve using GRAPHPAD Prism version 8.1.1.

[0793] De Novo Sequencing of Mouse Anti-Human CD28 Clone Obtained from Commercial Source:

[0794] A CD28 antibody was obtained from a commercial source and internally designated as clone C28B19. Antibody isotype was mouse IgG1, kappa. Sample preparation and LC/MSMS analysis were performed at Protea Bioscience Inc. (Morgantown, W. Va.). The sample was reduced and alkylated, divided into seven aliquots, and proteolytically digested with Trypsin/LysC, Chymotrypsin, LysC, Pepsin, and AspN, Elastase, and Proteinase K enzymes. Resulting peptides were desalted using a ZIPTIP C18 Pipette Tips and separated on-line using reverse phase chromatography. Mass spectrometry was performed on Thermo Q-EXACTIVE spectrometer using HCD fragmentation. MS data sets were analyzed using PEAKS software by matching de novo sequence tags to an IMGT-based antibody sequences database. Gaps in the sequence were assigned using Contig sequence assembly of de novo identified peptides. All CDRs and hyper-mutations were confirmed by inspecting the MS/MS spectra. Leu and Ile amino acid residues are practically indistinguishable by mass spectrometry. Leu/Ile in the CDR regions were identified by aligning the determined sequence to a V-region sequence database and confirmed by chymotrypsin enzyme specificity. The expected confidence in Leu/Ile identifications in the CDRs is 80%.

### Example 3.2: Anti-Vβ17/Anti-BCMA/Anti-CD28 Trispecific Antibody Production

[0795] The variable region sequence of anti-Vβ17, anti-CD28 and anti-BCMA antibodies were used to generate a trispecific human IgG1 antibody to be tested for T cell re-directed killing of H929 cells.

[0796] The trispecific antibodies were produced as Fab (CD28)×scFv (Vβ17)×scFv (BCMA) antibodies in the knob-into-hole format as human IgG1 with silent Fc. Nucleic acid sequences encoding variable regions were sub-cloned into a custom mammalian expression vectors containing constant region of human IgG1 expression cassettes using standard PCR restriction enzyme based standard cloning techniques, and sequences verified. The bispecific antibodies were expressed by transient transfection in Chinese hamster ovary cell line. The antibodies were initially purified by MABSELECT SURE Protein A column (GE Healthcare). The column was equilibrated with PBS pH 7.2 and loaded with fermentation supernatant at a flow rate of 2 mL/min. After loading, the column was washed with 4 column volumes of PBS followed by elution in 30 mM sodium acetate, pH 3.5. Fractions containing protein peaks as monitored by absorbance at 280 nm were pooled and neutralized to pH 5.0 by adding 1% 3 M sodium acetate pH 9.0. The bispecific mAbs were further purified on a preparative SUPERDEX 200 10/300 GL (GE healthcare) size exclusion chromatography (SEC) column equilibrated with PBS buffer. The integrity of sample was assessed by endotoxin measurement (<3.0 EU/mg), SDS-PAGE under reducing and non-reducing conditions, SEC, and intact mass by MS.

[0797] The design of the trispecific antibodies is shown in Table 12 below.

TABLE 12
Design of the trispecific antibodies

| | | Chain A | | Chain B | | |
|---|---|---|---|---|---|---|
| | | description | | description | | |
| | | N-term | | N-term | | |
| # | Name | (Fab) | C-term | (Fab) | C-term | Molecule Description |
| 1 | VB28B1 | C28B11 | B17B21 | C28B11 | BCMB519 | C28B11 × B17B21 × BCMB519 |
| 2 | VB28B2 | C28B19 | B17B21 | C28B19 | BCMB519 | C28B19 × B17B21 × BCMB519 |
| 3 | VB28B3 | C28B103 | B17B21 | C28B103 | BCMB519 | C28B103 × B17B21 × |
| | | | | | | BCMB519 |
| 4 | VB28B4 | C28B105 | B17B21 | C28B105 | BCMB519 | C28B105 × B17B21 × |
| | | | | | | BCMB519 |
| 5 | VB28B5 | B21M | B17B21 | B21M | BCMB519 | B21M × B17B21 × BCMB519 |
| 6 | VB28B6 | C28B11 | Null | C28B11 | BCMB519 | C28B11 × Null × BCMB519 |
| 7 | VB28B7 | C28B19 | Null | C28B19 | BCMB519 | C28B19 × Null × BCMB519 |
| 8 | VB28B8 | C28B103 | Null | C28B103 | BCMB519 | C28B103 × Null × BCMB519 |
| 9 | VB28B9 | C28B105 | Null | C28B105 | BCMB519 | C28B105 × Null × BCMB519 |
| 10 | VB28B10 | B21M | Null | B21M | BCMB519 | B21M × Null × BCMB519 |

### Example 3.3: Anti-Vβ17/Anti-BCMA/Anti-CD28 Trispecific Antibodies Show Potent Binding on Pan T Cells

[0798] To test the engagement of CD28 on Vβ17 T cells, Pan T cells were isolated from human PBMCs and tested for binding with the Vβ17×CD28×BCMA antibodies containing various CD28 binders. Antibodies with C28B19, C28B103 and C28B105 clones showed robust binding to pan T cells in a dose dependent manner. See FIG. 2 and Table 13. EC50 values for binding were determined to be 0.06 μg/ml, 0.03 μg/ml and 0.06 μg/ml respectively for C28B19, C28B103 and C28B105. Antibody with C28B11 clone was observed to be a poor binder for CD28 and showed binding to only 5% of pan T cells because of the Vβ17 binding arm. Vβ17×BCMA antibody also showed binding to 5% of pan T cells only which was also the frequency of Vβ17 T cells in the tested donors. Binding to pan T cells was dependent on the CD28 arm of the trispecific antibody as the EC50 values for binding of trispecific antibodies lacking the Vβ17 arm was similar to the full trispecific antibody. No binding was observed in antibodies lacking the Vβ17 and CD28 binding arms.

TABLE 13
Cell binding to Pan T cells

| Name | hIgG1 AAS format | EC₅₀ (μg/ml) |
|---|---|---|
| VB28B1 | Vb17xCD28xCD28xBCMA | No binding |
| VB28B2 | Vb17xCD28xCD28xBCMA | 0.06 |
| VB28B3 | Vb17xCD28xCD28xBCMA | 0.03 |
| VB28B4 | Vb17xCD28xCD28xBCMA | 0.06 |
| VB28B5 | Vb17xnullxnullxBCMA | Binding only observed |
| | | to Vb17 + T cells |
| VB28B6 | NullxCD28xCD28xBCMA | NA |
| VB28B7 | NullxCD28xCD28xBCMA | 0.06 |
| VB28B8 | NullxCD28xCD28xBCMA | 0.02 |
| VB28B9 | NullxCD28xCD28xBCMA | 0.15 |
| VB28B10 | NullxNullxBCMA | No binding |

### Example 3.4: Anti-Vβ17/Anti-BCMA/Anti-CD28 Trispecific Antibodies Show Potent Binding on H929 Cells Using BCMA and CD28

[0799] Abc. H929 cells were observed to express CD28 (data not shown). This is in line with multiple myeloma cells expressing CD28. Vβ17×CD28×BCMA trispecific antibodies showed potent binding to H929 cells in a CD28 and BCMA dependent manner. See FIG. 3 and Table 14. EC50 values for binding were determined to be 0.10 μg/ml, 0.03p g/ml and 0.14 μg/ml for trispecific antibodies with C28B19, C28B103 and C28B105 clones respectively. Binding of the trispecific antibodies was largely dependent upon CD28 arm as a potent decrease in binding was observed in absence of CD28 arm (EC50>5 μg/ml). VB28B1 antibody with C28B11 clone showed poorer binding on H929 cells also as compared to the other antibodies because of the weak affinity of the C28B 11 clone.

TABLE 14
Cell binding to BCMA expressing H929 cell line

| | | FC₅₀ |
|---|---|---|
| Name | hIgG1 AAS format | (μg/ml) |
| VB28B1 | Vb17xCD28xCD28xBCMA | >5 |
| VB28B2 | Vb17xCD28xCD28xBCMA | 0.04 |
| VB28B3 | Vb17xCD28xCD28xBCMA | 0.08 |
| VB28B4 | Vb17xCD28xCD28xBCMA | 0.06 |
| VB28B5 | Vb17xnullxnullxBCMA | >5 |
| VB28B6 | NullxCD28xCD28xBCMA | NA |
| VB28B7 | NullxCD28xCD28xBCMA | 0.10 |
| VB28B8 | NullxCD28xCD28xBCMA | 0.03 |
| VB28B9 | NullxCD28xCD28xBCMA | 0.14 |
| VB28B10 | NullxNullxBCMA | >5 |

### Example 3.5: Engagement of CD28 Potently Enhances the Activation of Vβ17 T Cells in Plate Bound Agonism Assay

[0800] To specifically examine the effect of CD28 stimulation on Vβ17 T cells, pan T cells were cultured on plates coated with Vβ17×CD28×BCMA or null×CD28×BCMA antibodies for 96 hours. At the end of the culture period activation of Vβ17 T cells was checked using CD25 (FIG. 4A), CD71 (FIG. 4B) and proliferation (FIG. 4C). VB28B2, VB28B3 and VB28B4 antibodies showed a strong enhancement of Vβ17 T cell activation as indicated by the upregulation of CD25 and CD71 expression on Vβ17 T cells and an increase in the proliferation of Vβ17 T cells. VB28B1 antibody did not show activation of Vβ17 T cells which was in line with the poor binding observed with this antibody. Activation with VB28B3 (clone C28B103) was observed to be the strongest. No increase in activation was observed with CD28 engagement in the absence of Vβ17 arm. As expected stimulation with CD3 and CD28 combination resulted in the activation of Vβ17 T cells. Overall CD28 costimulation resulted in robust enhancement of Vβ17 T cell activation and this was independent of the CD28 expression on target cells.

### Example 3.6: Engagement of CD28 Potently Enhances the Activation of Vβ17 T Cells in the Presence of H929 Cells

[0801] To investigate the effect of CD28 stimulation on Vβ17 T cells and the result of CD28 engagement on H929 cells, pan T cells were cultured with H929 cells at a 1:1 ET ratio of Vβ17 to H929 cells in the presence of the antibodies for 96 hours. Activation of Vβ17 T cells was observed in a dose dependent manner with the addition of Vβ17×BCMA antibody as indicated by the upregulation of CD25 (FIGS. 5A and 5B) and CD71 (FIGS. 5C and 5D) on Vβ17 T cells and an increase in the proliferation of Vβ17 T cells (FIGS. 5E, 5F and 5G). Two formats of Vβ17×BCMA antibodies were tested and activation with B17B619 antibody (Vβ17-Fab×BCMA-ScFv) was observed to stronger than the activation induced by VB28B5 antibody. Importantly the activation induced by Vβ17×CD28×BCMA antibodies was enhanced almost 100-fold as compared to the activation by Vβ17×BCMA antibody. This was true for VB28B2, VB28B3 and VB28B4 antibodies. VB28B1 antibody as before did not show any increase in the activation. Activation of Vβ17 negative T cells with the trispecific antibodies was also observed albeit at much lower levels than the Vβ17+ cells. Strong dose dependent activation of Vβ17+ cells was also observed with Null×CD28×BCMA antibody with the C28B103 binder indicating the agonistic activity of this CD28 clone. Interestingly activation of the Vβ17− cells with this clone of the null×CD28×BCMA antibody was lower than that of the Vβ17+ cells suggesting that Vβ17+ T cells may be inherently more activated than Vβ17− T cells. Among the other two CD28 binders, CD28B19 containing antibody VB28B2 and its VB17 null control VB28B7 was observed to be the best for inducing specific activation of Vβ17 T cells only. Vβ17×BCMA antibody as expected did not show any activation of Vβ17− T cells.

### Example 3.7: Engagement of CD28 does not Induce Exhaustion of Vβ17 T Cells

[0802] To test whether the increased activation induced by the engagement of CD28 on T cells would result in higher exhaustion of the Vβ17 T cells, pan T cells were cocultured with H929 cells in the presence of the Vβ17×CD28×BCMA trispecific antibodies or Vβ17×BCMA antibodies and their Null arm controls. To identify exhausted cells, TIM3, LAG3 and PD1 markers were used although PD1 upregulation is also a sign of T cell activation. PD1 was found to be upregulated on Vβ17+ T cells in the presence of both the Vβ17×BCMA antibodies and the Vβ17×CD28×BCMA antibodies (See FIG. 6B). As was observed with the activation markers, percentage of PD1+VB17 T cells was higher with Vβ17×CD28×BCMA antibodies as compared to Vβ17×BCMA antibody. LAG3 and TIM3 were observed to be induced only on a small fraction of the Vβ17 T cells and no upregulation was seen on the Vβ17− T cells (See FIGS. 6A and 6C). Overall, only 20% of the Vβ17 T cells were found to express TIM3 and LAG3.

### Example 3.8: Engagement of CD28 Potently Enhances the Cytotoxicity Induced by VB17 T Cells

[0803] To examine if the increased activation of the Vβ17 T cells in the presence of the Vβ17×CD28×BCMA trispecific antibodies also resulted in an increase in the functional activity of the Vβ17 T cells, cytotoxicity assays using H929 cells were set up (See FIGS. 7A, 7B and 7C). Vβ17×BCMA antibodies induced H929 target cell death in a dose dependent manner with an EC₅₀ of ˜0.01 μg/ml. This cytotoxicity was very strongly enhanced by the Vβ17×CD28×BCMA antibodies by about 100-fold. VB28B7 antibody (null×CD28×BCMA) did not show any cytotoxicity thus showing the specificity of the increased cytotoxic response. VB28B8 and VB28B9 (null×CD28×BCMA) antibodies which had shown activation of the Vβ17 T cells in the absence of the Vβ17 arm also showed cytotoxicity against H929 cells albeit at lower levels than Vβ17×CD28×BCMA antibodies. To show the specificity of the cytotoxic response induced by the Vβ17×CD28×BCMA antibodies, cytotoxic activity of Vβ17 T cells depleted Pan T cells was examined. Depletion of the Vβ17 T cells resulted in almost complete abrogation of the cytotoxic activity of the Vβ17×CD28×BCMA antibodies. Activity of the Vβ17×BCMA antibody was completely lost with the depletion of the Vβ17 T cells.

### Example 3.9: Engagement of CD28 Potently Enhances the Cytokine Secretion

[0804] Consistent with the enhancement of T cell activation and cytotoxicity, Vβ17×CD28×BCMA trispecifics also showed superior cytokine release in comparison to Vβ17×BCMA antibodies and Null×CD28×BCMA antibodies (See FIGS. 8A, 8B, 8C and 8D). VB28B1 antibody as expected did not show an increased cytokine release since this antibody showed poor CD28 binding and no Vβ17 T cell activation or cytotoxicity against H929 target cells. VB28B8 and VB29B9 antibodies also showed potent cytokine release although the levels were lower than the Vβ17×CD28×BCMA antibodies. This was in line with the activation profile of Vβ17 T cells observed with these antibodies.

### Example 3.10: Expression of Costimulatory Ligands on BCMA Expressing H929 Cell Lines

[0805] To check for expression of costimulatory ligands on multiple myeloma cell lines, multiple myeloma cell lines MM1.R and H929 were stained with anti-human CD28 (purified anti human CD28, cat #555725, BD Pharmingen) for 30 minutes followed by staining with goat anti-mouse IgG (cat #405307, Biolegend). For 41BBL expression, cells were stained with anti-human CD137 antibody (cat #311506) for 30 minutes on ice as per the manufacturer's protocol. All staining was done post Fc block. Following the staining, cells were acquired on the NOVOCYTE flow cytometer. Cells were gated on FSC/SSC, followed by live cell gating and CD28 expression and 41BB expression was plotted as histograms. As shown in FIG. 9, both tested multiple myeloma cell lines, MM1.R and H929 were found to express CD28 while no expression of 4IBBL was observed on either of the cell lines. This is in line with previous reports that have shown CD28 expression on primary myeloma plasma cells.

### Example 3.11: Evaluation of Anti-Vβ17/Anti-CD28/Anti-BCMA Trispecific Antibody

[0806] The variable region sequence of anti-Vβ17, anti-CD28 and anti-BCMA antibodies were used to generate a trispecific human IgG1 antibody to be tested for cytotoxicity, activation, cytokine release and proliferation. The trispecific antibodies were produced and the below described assays performed according to Example 3.1.

[0807] Exemplary anti-Vβ17/anti-CD28/anti-BCMA antibodies with their description are shown in FIG. 10. Exemplary control antibodies for anti-Vβ17/anti-CD28/anti-BCMA antibodies and their description are shown in FIG. 11.

### Evaluation of Anti-Vβ17/Anti-CD28/Anti-BCMA Antibodies

[0808] Cytotoxicity assays were performed according to Example 3.1 in CD28 KO H929 cells. CD28 KO has no effect on cytotoxicity or Vβ17 T cell activation induced by CD28 engagement for anti-Vβ17/anti-CD28/anti-BCMA antibodies as shown in Table 15. Activation profile of Vβ17+ T cells for anti-Vβ17/anti-CD28/anti-BCMA antibodies by expression of CD25 and CD71 was monitored in CD28 KO H929 cells and is shown in Table 16.

TABLE 15
EC₅₀ of anti-Vβ17/anti-CD28/anti-BMCA trispecific antibody.

| Antibody | Cytotoxicity EC₅₀ (μg/ml) |
|---|---|
| VB28B2-H929 WT | <0.000152 |
| VB28B7-H929 WT | >1 |
| VB28B2-H929 CD28 KO | <0.000152 |
| VB28B7-H929 CD28 KO | >1 |
| B17B619-H929 WT | 0.3201 |
| B17B620-H929 WT | ND |
| B17B619-H929 CD28 KO | 0.1328 |
| B17B620-H929 CD28 KO | ND |

TABLE 16
EC₅₀ of anti-Vβ17/anti-CD28/anti-BMCA trispecific antibody.

| Antibody | CD25 EC₅₀ (μg/ml) | CD71 EC₅₀ (μg/ml) |
|---|---|---|
| VB28B2-H929 WT | <0.000152 | <0.000152 |
| VB28B7-H929 WT | >1 | >1 |
| VB28B2-H929 CD28 KO | 0.0005493 | 0.0004558 |
| VB28B7-H929 CD28 KO | >1 | >1 |
| B17B619-H929 WT | 0.2734 | 0.2821 |
| B17B620-H929 WT | ND | ND |
| B17B619-H929 CD28 KO | 0.1502 | 0.1465 |
| B17B620-H929 CD28 KO | ND | ND |

[0809] Next, Bcl-xL level was analyzed in a Pan T cell assay comprising a 1:1 ratio of Vβ17 T cells:H929 cells. Bcl-xL expression was determined as described below. As shown in FIG. 13, apoptotic protein Bcl-xL is induced in Vβ17 T cells with CD28 activation.

[0810] BCL-XL Expression.

[0811] PBMCs were thawed and subjected to Pan T cell isolation using the EasySep™ Human T Cell Isolation Kit (17951, Stemcell). H929 cells were counted and plated at 10,000 cells per well in a 96 well U-bottom plate in 100 μl of RPMI media (ATCC modification)+20% FBS. Vβ17 T cell frequency was determined in the Pan T cells from each donor using the PE conjugated TCR Vβ17 antibody (IM2048, Beckman Coulter). Pan T cells were then added to the plated H929 cells such that an effector to target ratio of 1 Vβ17:1 H929 cell was obtained. 80 μl of the effector cell suspension in RPMI media+10% FBS was added per well. 10× concentration of the antibodies were prepared (10 μg/ml) followed by 3 fold serial dilutions in media. 20 μl of the serially diluted antibody was added to the 180 μl of the co-culture making the final concentration of the antibodies in coculture as 1×. The cell culture plates were incubated at 37° C. for 24 and 48 hrs. At the end of the incubation period, the cells were spun down at 1500 rpm for 5 mins and were stained with APC-Cy7 live/dead stain (L10119, Thermofisher) followed by staining with Fc block (422302, Biolegend). The cell pellet was taken for staining with Brilliant Violet 785™ anti-human CD25 (302638, Biolegend), PE conjugated TCR Vβ17 antibody (IM2048, Beckman Coulter) and Brilliant Violet 510™ anti-human αβ (306734, Biolegend) as per the manufacturer's recommendation. Cells were washed post staining in FACS buffer and fixed with BD cytofix buffer (554655, BD Bioscience). Post fixation, samples were permeabilised by adding 90% methanol and was incubated for 10 min on ice. The cells were washed post incubation and then stained with Bcl-XL (54H6) Rabbit mAb APC conjugated (1:50 dilution) (12099S, Cell signalling). The cells were incubated for 45 min at 4° C. Post incubation, the cells were washed and then resuspended in FACS buffer and acquired on the NOVOCYTE flow cytometer. Cells were gated on the live cell population, followed by gating on Vβ17+ T cells. Expression of Bcl-XL was monitored at 24 and 48 hrs at different concentration and plotted using GRAPHPAD Prism version 8.1.1.

### Evaluation of Exemplary Control and Null Antibodies

[0812] Cytotoxicity assays were performed according to Example 3.1 in Vβ17+ T cells and H929 cells (1:1 ET ratio). As shown in Table 17, combining CD28 costimulation with Vβ17 TCR stimulation potently enhances cytotoxicity compared to Vβ17 TCR stimulation alone. Anti-Vβ17/anti-CD28/anti-CD28 antibody shows similar cytotoxicity to anti-Vβ17/anti-BCMA antibody when using the C28B19 binder as H929 cells also express CD28. No cytotoxicity was shown with CD28 bispecific, however, when CD28 was combined with BCMA, cytotoxicity was induced.

TABLE 17
EC₅₀ of anti-Vβ17/anti-CD28/anti-BMCA trispecific antibody.

| Antibody | Cytotoxicity EC₅₀ (μg/ml) |
|---|---|
| VB28B2 | <0.000152 |
| VB28B7 | >1 |
| VB28B16 | 0.01714 |
| VB28B19 | ND |
| VB28B4 | <0.000152 |
| VB28B9 | 0.08105 |
| VB28B17 | 0.005312 |
| VB28B20 | ND |
| B17B619 | 0.04087 |
| B17B620 | ND |

[0813] Table 18 shows the activation profile of Vβ17+ T cells with the C28B19 binder. Combining CD28 costimulation with Vβ17 TCR stimulation potently enhances the activation of Vβ17+ cells compared to Vβ17 TCR stimulation alone. Anti-Vβ17/anti-CD28/anti-CD28 antibody shows higher activation as compared to anti-Vβ17/anti-BCMA antibody. No activation was observed with anti-CD28/null bispecific, but activation was observed with anti-CB28/anti-BCMA antibody.

TABLE 18
Summary of activation profile of Vβ17 cells with the C28B19 binder.

| | | | | | proliferation EC₅₀ | |
|---|---|---|---|---|---|---|
| | CD25 EC₅₀ (μg/ml) | | CD71 EC₅₀ (μg/ml) | | (μg/ml) | |
| | Donor 1 | Donor 2 | Donor 1 | Donor 2 | Donor 1 | Donor 2 |
| Antibody | (20001461) | (20001464) | (20001461) | (20001464) | (20001461) | (20001464) |
| VB28B2 | <0.000152 | <0.000152 | <0.000152 | <0.000152 | 0.0007426 | <0.000152 |
| VB28B7 | >1 | >1 | >1 | >1 | >1 | >1 |
| VB28B16 | 0.009315 | 0.005331 | 0.008532 | 0.003268 | 0.01215 | 0.006202 |
| VB28B19 | >1 | >1 | >1 | >1 | ND | ND |
| B17B619 | 0.05358 | 0.01947 | 0.04002 | 0.01204 | 0.1203 | 0.02921 |
| B17B620 | >1 | >1 | >1 | >1 | >1 | >1 |

[0814] FIG. 14 shows the activation profile of Vβ17− T cells with anti-Vβ17/anti-CD28 control antibodies containing a C28B19 binder, while FIG. 16 shows the activation profile of Vβ17− T cells with C28B105 binder. FIG. 15 shows cytokine release from anti-Vβ17/anti-CD28 control antibodies containing a C28B19 binder, while FIG. 17 shows cytokine release with C28B105 binder. Cytokine secretion is enhanced with CD28 costimulation in both FIG. 15 and FIG. 17. Table 19 shows the activation profile of Vβ17+ T cells with the C28B105 binder.

TABLE 19
Summary of activation profile of Vβ17 cells with the C28B105 binder.

| | | | | | proliferation EC₅₀ | |
|---|---|---|---|---|---|---|
| | CD25 EC₅₀ (μg/ml) | | CD71 EC₅₀ (μg/ml) | | (μg/ml) | |
| | Donor 1 | Donor 2 | Donor 1 | Donor 2 | Donor 1 | Donor 2 |
| Antibody | (20001461) | (20001464) | (20001461) | (20001464) | (20001461) | (20001464) |
| VB28B4 | <0.000152 | <0.000152 | <0.000152 | <0.000152 | 0.0007701 | <0.000152 |
| VB28B9 | >1 | >1 | >1 | >1 | >1 | >1 |
| VB28B17 | 0.002414 | 0.001535 | 0.002262 | 0.001300 | 0.004898 | 0.001532 |
| VB28B20 | >1 | >1 | >1 | >1 | >1 | ND |
| B17B619 | 0.05358 | 0.01947 | 0.04002 | 0.01204 | 0.1203 | 0.02921 |
| B17B620 | >1 | >1 | >1 | >1 | >1 | >1 |

[0815] FIG. 18 shows the activation profile of Vβ17+ T cells with anti-Vβ17/null or null/null controls. There was no activation of Vβ17+ T cells with null arm controls.

[0816] Next, the performance of anti-Vβ17/anti-CD28/anti-BCMA antibodies were compared to their respective controls. Anti-Vβ17/anti-CD28/anti-BCMA antibodies with C28B19 or C28B105 binders depleted Vβ17 T cells, which resulted in complete loss of cytotoxicity induced by anti-Vβ17/anti-BCMA antibody (See FIG. 19 and FIG. 20). There was also no observed cytotoxicity with anti-CD28/null bispecific antibody, only with anti-CD28/anti-BCMA antibody. Table 20 shows a summary of the Vβ17 T cell cytotoxicity observed.

TABLE 20
Summary of cytotoxicity observed in presence of Vβ17 T cells.

Cytotoxicity EC₅₀ (μg/ml)

| | Donor 1 | Donor 2 |
|---|---|---|
| Antibody | (HPU 12096) | (HPU 11198) |
| VB28B2 | <0.000152 | <0.000152 |
| VB28B7 | 0.04744 | 0.07568 |
| VB28B16 | 0.004458 | 0.001278 |
| VB28B19 | >1 | ND |
| VB28B4 | <0.000152 | <0.000152 |
| VB28B9 | >1 | >1 |
| VB28B17 | 0.005208 | 0.001171 |
| VB28B20 | >1 | ND |
| B17B619 | 0.02318 | 0.002288 |
| B17B620 | >1 | ND |

[0817] Next, cytotoxicity was measured in Pan T cells using anti-Vβ17/anti-CD28/anti-BCMA antibodies and their control antibodies. FIG. 21 shows the activation profile of Vβ17+ T cells and Vβ17− T cells, with anti-Vβ17/anti-CD28/anti-BCMA antibodies in Donor 1. Combining CD28 costimulation with Vβ17 TCR stimulation potently enhances the activation of Vβ17+ T cells compared to Vβ17 TCR stimulation alone. Anti-Vβ17/anti-CD28/anti-BCMA antibody shows higher activation compared to anti-Vβ17/anti-BCMA antibody, there was no activation with anti-CD28/null bispecific antibody, and activation was observed with anti-CD28/anti-BCMA antibody. FIG. 22 shows the activation profile of Vβ17+ T cells and Vβ17− T cells, with anti-Vβ17/anti-CD28/anti-BCMA antibodies in Donor 2. Combining CD28 costimulation with Vβ17 TCR stimulation potently enhances the activation of Vβ17+ T cells compared to Vβ17 TCR stimulation alone. Anti-Vβ17/anti-CD28/anti-BCMA antibody shows higher activation compared to anti-Vβ17/anti-BCMA antibody, there was no activation with anti-CD28/null bispecific antibody, and activation was observed with anti-CD28/anti-BCMA antibody. Table 21 provides a summary of the activation profile of Vβ17 cells with the C29B19 binder.

TABLE 21
summary of the activation profile of Vβ17 cells with the C29B19 binder.

| | CD25 EC₅₀ (μg/ml) | | CD71 EC₅₀ (μg/ml) | | proliferation EC₅₀ (μg/ml) | |
|---|---|---|---|---|---|---|
| | Donor 1 | Donor 2 | Donor 1 | Donor 2 | Donor 1 | Donor 2 |
| Antibody | (NHV12486) | (NHHV12505) | (NHV12486) | (NHHV12505) | (NHV12486) | (NHHV12505) |
| VB28B2 | 0.001219 | 0.0008328 | 0.0003172 | 0.0004703 | 0.0007165 | 0.001188 |
| VB28B7 | >1 | >1 | >1 | >1 | >1 | >1 |
| VB28B16 | 0.01181 | 0.01634 | 0.004179 | 0.005700 | 0.005637 | 0.007809 |
| VB28B19 | >1 | >1 | >1 | ND | >1 | >1 |
| B17B619 | >1 | 0.05333 | 0.01854 | 0.03407 | 0.02637 | 0.05754 |
| B17B620 | ND | ND | ND | ND | ND | ND |

[0818] FIG. 23 and FIG. 24 show cytokine release in Pan T cells expressing or depleted of Vβ17 with a C28B19 binder in Donor 1 (FIG. 23) Donor 2 (FIG. 24). Cytokine secretion is enhanced with CD28 costimulation in a Vβ17 T cell dependent manner.

[0819] FIG. 25 and FIG. 26 show the activation profile of Vβ17+ T cells and Vβ17− T cells with anti-Vβ17/anti-CD28/anti-BCMA antibodies containing C28B105 in Donor 1 (FIG. 25) or Donor 2 (FIG. 26). Combining CD28 costimulation with Vβ17 TCR stimulation potently enhances the activation of Vβ17+ cells compared to Vβ17 TCR stimulation alone. Anti-Vβ17/anti-CD28/anti-BCMA antibody shows higher activation as compared to anti-Vβ17/anti-BCMA antibody. There was no activation observed with anti-CD28/null bispecific antibody but activation was observed with anti-CD28/anti-BCMA antibody. Table 22 further summarizes the activation profile of Vβ17 cells with the C28B105 binder.

TABLE 22
Summary of activation profile of Vβ17 cells with the C28B105 binder.

| | CD25 EC₅₀ (μg/ml) | | CD71 EC₅₀ (μg/ml) | | proliferation EC₅₀ (μg/ml) | |
|---|---|---|---|---|---|---|
| | Donor 1 | Donor 2 | Donor 1 | Donor 2 | Donor 1 | Donor 2 |
| Antibody | (NHV12486) | (NHHV12505) | (NHV12486) | (NHHV12505) | (NHV12486) | (NHHV12505) |
| VB28B4 | 0.009595 | 0.0001320 | 0.0002389 | 0.0006759 | 0.0007455 | 0.001514 |
| VB28B9 | >1 | >1 | >1 | >1 | >1 | >1 |
| VB28B17 | 0.02020 | 0.02107 | 0.004712 | 0.006995 | ND | 0.01027 |
| VB28B20 | >1 | >1 | ND | ND | ND | ND |
| B17B619 | 0.1181 | 0.05333 | 0.01854 | 0.03407 | 0.02637 | 0.05754 |
| B17B620 | ND | ND | ND | ND | ND | ND |

[0820] FIG. 27 and FIG. 28 show cytokine release in Pan T cells with or depleted of Vβ17 in Donor 1 (FIG. 29) or Donor 2 (FIG. 30).

[0821] FIG. 31 shows activation profile of Vβ17+ and Vβ17− T cells with anti-Vβ17/anti-CD28/anti-BCMA antibodies containing C28B19 in the absence of target cells, whereas FIG. 32 shows the activation profile of Vβ17+ and Vβ17− T cells with anti-Vβ17/anti-CD28/anti-BCMA antibodies containing C28B105. In FIG. 31, combining CD28 costimulation with Vβ17 TCR stimulation enhanced the activation of Vβ17+ cells compared to Vβ17 TCR stimulation alone or in the absence of target cells. Anti-Vβ17/anti-CD28/anti-CD28 antibodies show similar activation as compared to anti-Vβ17/anti-CD28/anti-BCMA antibodies, activation is observed with anti-CD28/anti-BCMA antibody, but there is no activation with anti-CD28/null or anti-CD28/anti-BCMA bispecific antibodies. In FIG. 32, combining CD28 costimulation with Vβ17 TCR stimulation enhanced the activation of Vβ17+ cells compared to Vβ17 TCR stimulation alone. Anti-Vβ17/anti-CD28/anti-CD28 antibodies show higher activation as compared to anti-Vβ17/anti-BCMA antibodies, activation is observed with anti-CD28/anti-BCMA antibody, but there is no activation with anti-CD28/null bispecific antibodies. Table 23 further summarizes Vβ17 T cell activation in absence of target cells.

TABLE 23
Summary of Vβ17 T cell activation in absence of target cells.

| | | | proliferation |
|---|---|---|---|
| Antibody | CD25 EC₅₀ (μg/ml) | CD71 EC₅₀ (μg/ml) | EC₅₀ (μg/ml) |
| VB28B2 | 0.01035 | 0.008070 | 0.01406 |
| VB28B7 | >1 | >1 | >1 |
| VB28B16 | 0.008087 | 0.006496 | 0.008845 |
| VB28B19 | ND | >1 | ND |
| VB28B4 | 0.008640 | 0.005567 | 0.01513 |
| VB28B9 | ND | >1 | >1 |
| VB28B17 | 0.009397 | 0.007823 | ND |
| VB28B20 | ND | >1 | >1 |
| B17B619 | ND | >1 | ND |
| B17B620 | ND | ND | ND |

[0822] FIG. 33 and FIG. 34 show that anti-Vβ17/anti-CD28/anti-BCMA antibodies do not induce cytotoxicity against TAA cell lines.

### Example 4: Multispecific Antibodies that Bind Vβ17, CD28 and PSMA

[0823] The variable region sequence of anti-Vβ17, anti-CD28 and anti-PSMA antibodies were used to generate a trispecific human IgG1 antibody to be tested for binding and cytotoxicity. The trispecific antibodies were produced, and the below described assays performed, according to Example 3.1. Exemplary anti-Vβ17/anti-CD28/anti-PSMA antibodies are shown in FIG. 14.

[0824] Cytotoxicity Assay (INCUCYTE).

[0825] One day prior to the assay setup, C42B-NLR and LnCAP-GFP were plated 7000/well and kept overnight at 37° C. in a 5% CO2 incubator. On the day of the assay, PBMCs were thawed and subjected to Pan T cell isolation using the EasySep™ Human T Cell Isolation Kit (17951, Stemcell). Vβ17 T cell frequency was determined in the Pan T cells from each donor using the PE conjugated TCR Vβ17 antibody (IM2048, Beckman Coulter). CTV labeled Pan T cells were then added to the plated C42B-NLR and LnCAP-GFP cells such that an effector to target ratio of 1 Vβ17:1 target cell was obtained. 10× concentration of the antibodies were prepared followed by serial dilutions in media. 20 μl of the serially diluted antibody was added to the 180 μl of the co-culture making the final concentration of the antibodies in coculture as 1×. The cell culture plates were incubated at 37° C. Incucyte. Appropriate settings were selected with scans were scheduled after every 3 hrs. Post 72 Hrs and 96 Hrs of incubation, analysis was performed using INCUCYTE software. From the analysis, Fluorescence intensity from each well was obtained. Fluorescence intensity recorded is directly proportional to the live cell population in the well. Antibody specific percentage dead cells were calculated from the live population observed in wells as per the below mentioned formula. Percentage dead cells were plotted against log concentration of the antibody in a 4-parameter non-linear regression curve using GRAPHPAD Prism version 8.1.1. Percent live cells is calculated by evaluating intensity in the well with the antibody/intensity in the well with no antibody×100. The percent of lysis (dead cells) is calculated as 100−% live cells.

[0826] Pan T cell, LnCaP cell, and C4-2B cell binding using anti-Vβ17/anti-CD28/anti-PSMA antibodies is shown in Table 24 and FIG. 33.

TABLE 24
Summary of Binding to Pan T cells and Target cells.

| | Pan T cell Binding EC₅₀ | | LnCaP cell | C4-2B cell |
|---|---|---|---|---|
| | (μg/ml) | | Binding | Binding |
| Antibody | Donor 1 | Donor 2 | EC₅₀ (μg/ml) | EC₅₀ (μg/ml) |
| VB28B28 | >10 | >10 | 0.1596 | 1.095 |
| VB28B29 | >10 | >10 | 0.1349 | 0.9797 |
| VB28B31 | 1.292 | 0.9500 | 0.1498 | 1.2222 |
| VB28B32 | >10 | >10 | 0.2331 | 1.722 |
| VB28B33 | >10 | >10 | ND | ND |
| VB28B34 | >10 | >10 | 0.1455 | 1.030 |

[0827] Dose-dependent cytotoxicity was observed with only anti-Vβ17/anti-CD28/anti-PSMA antibodies on C4-2B cells FIG. 33. No cytotoxicity was observed with anti-Vβ17/null/anti-PSMA antibody or for antibodies with PMSA on the CD28 light chain N-terminus.

[0828] Table 25 further demonstrates a summary of anti-Vβ17/anti-CD28/anti-PSMA antibodies binding to Pan T cells and H929 Target Cells.

TABLE 25
Binding data for anti-Vβ17/anti-CD28/anti-PSMA antibodies

| | | | H929 cell |
|---|---|---|---|
| | Pan T cell Binding EC₅₀ (μg/ml) | | Binding |
| Antibody | Donor 1 | Donor 2 | EC₅₀ (μg/ml) |
| VB28B33 | >10 | >10 | 1.404 |
| VB28B35 | >10 | >10 | <0.0046 |
| VB28B36 | ND | ND | <0.0046 |
| VB28B38 | 1.267 | 1.076 | <0.0046 |
| VB28B39 | >10 | >10 | 0.01673 |
| VB28B40 | 1.124 | 1.213 | 0.1206 |
| B17B619 | 0.1589 | 0.1244 | 0.1223 |
| B17B620 | >10 | >10 | >10 |

[0829] Table 26 demonstrates a summary of anti-Vβ17/anti-CD28/anti-PSMA antibody cytotoxicity using H929 Target Cells.

TABLE 26
Cytotoxicity data for anti-Vβ17/anti-CD28/anti-PSMA antibodies

H929 cell Binding EC₅₀ (μg/ml)

| Antibody | Donor 1 | Donor 2 |
|---|---|---|
| VB28B33 | 0.6249 | 0.3780 |
| VB28B35 | <0.0046 | <0.0046 |
| VB28B36 | ND | ND |
| VB28B38 | ND | ND |
| VB28B39 | <0.0046 | <0.0046 |
| VB28B40 | ND | ND |
| B17B619 | 0.01692 | 0.01282 |
| B17B620 | ND | ND |

### Example 5: Exemplary Antibodies and Sequences

[0830] Additional details of exemplary antibodies used in certain Examples herein are provided in Table 27 and Table 28.

TABLE 27
Exemplary Vβ17, CD28, BCMA and PSMA Antibody Clones.

| | | VH | VL | VH CDR1* | VH CDR2 | VH CDR3 | VL CDR1 | VL CDR2 | VL CDR3 |
|---|---|---|---|---|---|---|---|---|---|
| | Target | SEQ ID | SEQ ID | SEQ ID | SEQ ID | SEQ ID | SEQ ID | SEQ ID | SEQ ID |
| E17.5F | Vβ17 | 25 | 26 | 1 | 2 | 3 | 4 | 5 | 6 |
| B17B1 | Vβ17 | 25 | 26 | 1 | 2 | 3 | 4 | 5 | 6 |
| B17H1 | Vβ17 | 25 | 26 | 1 | 2 | 3 | 4 | 5 | 6 |
| B17H3 | Vβ17 | 19 | 22 | 1 | 2 | 3 | 4 | 5 | 6 |
| B17H4 | Vβ17 | 20 | 23 | 1 | 2 | 3 | 4 | 5 | 6 |
| B17H5 | Vβ17 | 21 | 24 | 1 | 2 | 3 | 4 | 5 | 6 |
| B17B14 | Vβ17 | 19 | 22 | 1 | 2 | 3 | 4 | 5 | 6 |
| B17B15 | Vβ17 | 19 | 23 | 1 | 2 | 3 | 4 | 5 | 6 |
| B17B16 | Vβ17 | 19 | 24 | 1 | 2 | 3 | 4 | 5 | 6 |
| B17B17 | Vβ17 | 20 | 22 | 1 | 2 | 3 | 4 | 5 | 6 |
| B17B18 | Vβ17 | 20 | 23 | 1 | 2 | 3 | 4 | 5 | 6 |
| B17B19 | Vβ17 | 20 | 24 | 1 | 2 | 3 | 4 | 5 | 6 |
| B17B20 | Vβ17 | 21 | 22 | 1 | 2 | 3 | 4 | 5 | 6 |
| B17B21 | Vβ17 | 21 | 23 | 1 | 2 | 3 | 4 | 5 | 6 |
| B17B22 | Vβ17 | 21 | 24 | 1 | 2 | 3 | 4 | 5 | 6 |
| B17B2 | Vβ17 | 46 | 47 | 45 | 2 | 3 | 4 | 5 | 6 |
| Vb17_202B4D1 | Vβ17 | 77 | 78 | 48 | 49 | 50 | 51 | 52 | 53 |
| Vb17_210E10A1 | Vβ17 | 79 | 80 | 48 | 54 | 55 | 56 | 57 | 58 |
| B17B663 | Vβ17 | 81 | 82 | 59 | 49 | 60 | 61 | 62 | 63 |
| B17B694 | Vβ17 | 83 | 84 | 64 | 65 | 66 | 67 | 68 | 69 |
| B17B698 | Vβ17 | 85 | 86 | 70 | 49 | 71 | 61 | 72 | 73 |
| B17B733 | Vβ17 | 87 | 88 | 48 | 74 | 75 | 56 | 57 | 76 |
| Vb17_N33S | Vβ17 | 21 | 665 | 1 | 2 | 3 | 664 | 5 | 6 |
| C28B11 | CD28 | 690 | 696 | 721 | 727 | 733 | 812 | 818 | 824 |
| C28B19 | CD28 | 691 | 697 | 722 | 728 | 734 | 813 | 819 | 825 |
| C28B103 | CD28 | 692 | 698 | 723 | 729 | 735 | 814 | 820 | 826 |
| C28B105 | CD28 | 693 | 699 | 724 | 730 | 736 | 815 | 821 | 827 |
| BCMB519 | BCMA | 92 | 96 | 89 | 90 | 91 | 92 | 93 | 94 |
| PSMB410 | PSMA | 1046 | 1047 | 1019 | 1020 | 1021 | 1034 | 1035 | 1036 |

*VH CDR1-3 and VL CDR1-3 sequences shown by single definition only. Other CDR definitions known in the art may also be utilized (e.g., Exemplary, Kabat, Chothia, AbM, IMGT, and/or Contact).

TABLE 28
Exemplary Multispecific Antibodies.

| | | | | HC 1 | | LC 1 | | HC 2 | | LC 1 | Variable |
|---|---|---|---|---|---|---|---|---|---|---|---|
| | | | HC 1 | SEQ | LC 1 | SEQ | HC 2 | SEQ | LC 2 | SEQ | Region |
| Name | Description | Isotype | Isotype | ID | Isotype | ID | Isotype | ID | Isotype | ID | Name |
| B17B619 | HC1 (ZWA): | IgG1, | IgG1 | 942 | Kappa | 965 | IgG1 | 978 | NA | NA | BCMB519, |
| | Vb17-B17B21- | Kappa, | | | | | | | | | Vb17- |
| | N33S-Fab-RF; | IgG1 | | | | | | | | | B17B21-LC- |
| | HC2 (ZWB): | | | | | | | | | | N33S |
| | BCMB519-LH-scFv | | | | | | | | | | |
| B17B620 | HC1 (ZWA): | IgG1, | IgG1 | 943 | Kappa | 966 | IgG1 | 1049 | NA | NA | Vb17- |
| | Vb17-B17B21- | Kappa, | | | | | | | | | B17B21-LC- |
| | N33S-Fab-RF; | IgG1 | | | | | | | | | N33S, |
| | HC2 (ZWB): | | | | | | | | | | Null-LH- |
| | Null-LH- | | | | | | | | | | MSCD334 |
| | MSCD334-scFv | | | | | | | | | | |
| VB28B2 | HC1 (KIHA): N- | IgG1, | IgG1 | — | Kappa | — | IgG1 | — | Kappa | — | BCMB519, |
| | term: C28B19- | Kappa, | | | | | | | | | Vb17- |
| | Fab, C-term: | IgG1, | | | | | | | | | B17B21-LC- |
| | Vb17-B17B21- | Kappa | | | | | | | | | N33S, |
| | N33S-LH-scFv; | | | | | | | | | | C28B19; |
| | HC2 (KIHB): N- | | | | | | | | | | C28F72 |
| | term: C28B19- | | | | | | | | | | |
| | Fab-RF, C-term: | | | | | | | | | | |
| | BCMB519-LH-scFv | | | | | | | | | | |
| VB28B4 | HC1 (KIHA): N- | IgG1, | IgG1 | — | Kappa | — | IgG1 | — | Kappa | — | BCMB519, |
| | term: C28B105 | Kappa, | | | | | | | | | Vb17- |
| | (C28Y3/4_093_B10)- | IgG1, | | | | | | | | | B17B21-LC- |
| | Fab, C-term: | Kappa | | | | | | | | | N33S, |
| | Vb17-B17B21- | | | | | | | | | | C28F102 |
| | N33S-LH-scFv; | | | | | | | | | | |
| | HC2 (KIHB): N- | | | | | | | | | | |
| | term: C28B105 | | | | | | | | | | |
| | (C28Y3/4_093_B10)- | | | | | | | | | | |
| | Fab-RF, C- | | | | | | | | | | |
| | term: BCMB519- | | | | | | | | | | |
| | LH-scFv | | | | | | | | | | |
| VB28B7 | HC1 (KIHA): N- | IgG1, | IgG1 | — | Kappa | — | IgG1 | — | Kappa | — | BCMB519, |
| | term: C28B19- | Kappa, | | | | | | | | | C28B19; |
| | Fab, C-term: | IgG1, | | | | | | | | | C28F72, |
| | Null-LH- | Kappa | | | | | | | | | Null-LH- |
| | MSCD334-scFv; | | | | | | | | | | MSCD334 |
| | HC2 (KIHB): N- | | | | | | | | | | |
| | term: C28B19- | | | | | | | | | | |
| | Fab-RF, C-term: | | | | | | | | | | |
| | BCMB519-LH-scFv | | | | | | | | | | |
| VB28B9 | HC1 (KIHA): N- | IgG1, | IgG1 | — | Kappa | — | IgG1 | — | Kappa | — | BCMB519, |
| | term: C28B105 | Kappa, | | | | | | | | | C28F102, |
| | (C28Y3/4_093_B10)- | IgG1, | | | | | | | | | Null-LH- |
| | Fab, C-term: | Kappa | | | | | | | | | MSCD334 |
| | Null-LH- | | | | | | | | | | |
| | MSCD334-scFv; | | | | | | | | | | |
| | HC2 (KIHB): N- | | | | | | | | | | |
| | term: C28B105 | | | | | | | | | | |
| | (C28Y3/4_093_B10)- | | | | | | | | | | |
| | Fab-RF, C- | | | | | | | | | | |
| | term: BCMB519- | | | | | | | | | | |
| | LH-scFv | | | | | | | | | | |
| VB28B16 | HC1 (Knob3): N- | IgG1, | IgG1 | 944 | Kappa | 967 | IgG1 | 980 | Kappa | 1001 | Vb17- |
| | term: C28B19- | Kappa, | | | | | | | | | B17B21-LC- |
| | Fab, C-term: | IgG1, | | | | | | | | | N33S, |
| | Vb17-B17B21- | Kappa | | | | | | | | | C28B19; |
| | N33S-LH-scFv; | | | | | | | | | | C28F72 |
| | HC2 (Hole3-RF): | | | | | | | | | | |
| | C28B19-Fab-RF | | | | | | | | | | |
| VB28B17 | HC1 (Knob3): N- | IgG1, | IgG1 | 945 | Kappa | 968 | IgG1 | 981 | Kappa | 1002 | Vb17- |
| | term: C28B105- | Kappa, | | | | | | | | | B17B21-LC- |
| | Fab, C-term: | IgG1, | | | | | | | | | N33S, |
| | Vb17-B17B21- | Kappa | | | | | | | | | C28F102 |
| | N33S-LH-scFv; | | | | | | | | | | |
| | HC2 (Hole3-RF): | | | | | | | | | | |
| | C28B105-Fab-RF | | | | | | | | | | |
| VB28B18 | HC1 (Knob3): N- | IgG1, | IgG1 | 946 | Kappa | 969 | IgG1 | 982 | Kappa | 1003 | B21M; |
| | term: B21M-Fab, | Kappa, | | | | | | | | | 12782L_19, |
| | C-term: Vb17- | IgG1, | | | | | | | | | Vb17- |
| | B17B21-N33S-LH- | Kappa | | | | | | | | | B17B21-LC- |
| | scFv; HC2 | | | | | | | | | | N33S |
| | (Hole3-RF): | | | | | | | | | | |
| | B21M-Fab-RF | | | | | | | | | | |
| VB28B19 | HC1 (Knob3): N- | IgG1, | IgG1 | 947 | Kappa | 970 | IgG1 | 983 | Kappa | 1004 | C28B19; |
| | term: C28B19- | Kappa, | | | | | | | | | C28F72, |
| | Fab, C-term: | IgG1, | | | | | | | | | Null-LH- |
| | Null-LH- | Kappa | | | | | | | | | MSCD334 |
| | MSCD334-scFv; | | | | | | | | | | |
| | HC2 (Hole3-RF): | | | | | | | | | | |
| | C28B19-Fab-RF | | | | | | | | | | |
| VB28B20 | HC1 (Knob3): N- | IgG1, | IgG1 | 948 | Kappa | 971 | IgG1 | 984 | Kappa | 1005 | C28F102, |
| | term: C28B105- | Kappa, | | | | | | | | | Null-LH- |
| | Fab, C-term: | IgG1, | | | | | | | | | MSCD334 |
| | Null-LH- | Kappa | | | | | | | | | |
| | MSCD334-scFv; | | | | | | | | | | |
| | HC2 (Hole3-RF): | | | | | | | | | | |
| | C28B105-Fab-RF | | | | | | | | | | |
| VB28B21 | HC1 (Knob3): N- | IgG1, | IgG1 | 949 | Kappa | 972 | IgG1 | 985 | Kappa | 1006 | B21M; |
| | term: B21M-Fab, | Kappa, | | | | | | | | | 12782L_19, |
| | C-term: Null- | IgG1, | | | | | | | | | Null-LH- |
| | LH-MSCD334- | Kappa | | | | | | | | | MSCD334 |
| | scFv; HC2 | | | | | | | | | | |
| | (Hole3-RF): | | | | | | | | | | |
| | B21M-Fab-RF | | | | | | | | | | |
| VB28B22 | HC1 (Knob3): N- | IgG1, | IgG1 | 950 | Kappa | 973 | IgG1 | 986 | NA | NA | Vb17- |
| | term: C28B19- | Kappa, | | | | | | | | | B17B21-LC- |
| | Fab, C-term: | IgG1 | | | | | | | | | N33S, |
| | Vb17-B17B21- | | | | | | | | | | C28B19; |
| | N33S-LH-scFv; | | | | | | | | | | C28F72, |
| | HC2 (Hole3): | | | | | | | | | | Null-LH- |
| | Null-LH- | | | | | | | | | | MSCD334 |
| | MSCD334- | | | | | | | | | | |
| | scFv_K447 | | | | | | | | | | |
| VB28B23 | HC1 (Knob3): N- | IgG1, | IgG1 | 951 | Kappa | 974 | IgG1 | 987 | NA | NA | Vb17- |
| | term: C28B105- | Kappa, | | | | | | | | | B17B21-LC- |
| | Fab, C-term: | IgG1 | | | | | | | | | N33S, |
| | Vb17-B17B21- | | | | | | | | | | C28F102, |
| | N33S-LH-scFv; | | | | | | | | | | Null-LH- |
| | HC2 (Hole3): | | | | | | | | | | MSCD334 |
| | Null-LH- | | | | | | | | | | |
| | MSCD334- | | | | | | | | | | |
| | scFv_K447 | | | | | | | | | | |
| VB28B24 | HC1 (Knob3): N- | IgG1, | IgG1 | 952 | Kappa | 975 | IgG1 | 988 | NA | NA | B21M; |
| | term: B21M-Fab, | Kappa, | | | | | | | | | 12782L_19, |
| | C-term: Vb17- | IgG1 | | | | | | | | | Vb17- |
| | B17B21-N33S-LH- | | | | | | | | | | B17B21-LC- |
| | scFv; HC2 | | | | | | | | | | N33S, |
| | (Hole3): Null- | | | | | | | | | | Null-LH- |
| | LH-MSCD334- | | | | | | | | | | MSCD334 |
| | scFv_K447 | | | | | | | | | | |
| VB28B25 | HC1 (Knob3): N- | IgG1, | IgG1 | 953 | Kappa | 976 | IgG1 | 989 | NA | NA | C28B19; |
| | term: C28B19- | Kappa, | | | | | | | | | C28F72, |
| | Fab, C-term: | IgG1 | | | | | | | | | Null-LH- |
| | Null-LH- | | | | | | | | | | MSCD334 |
| | MSCD334-scFv; | | | | | | | | | | |
| | HC2 (Hole3): | | | | | | | | | | |
| | Null-LH- | | | | | | | | | | |
| | MSCD334- | | | | | | | | | | |
| | scFv_K447 | | | | | | | | | | |
| VB28B26 | HC1 (Knob3): N- | IgG1, | IgG1 | 954 | Kappa | 977 | IgG1 | 990 | NA | NA | C28F102, |
| | term: C28B105- | Kappa, | | | | | | | | | Null-LH- |
| | Fab, C-term: | IgG1 | | | | | | | | | MSCD334 |
| | Null-LH- | | | | | | | | | | |
| | MSCD334-scFv; | | | | | | | | | | |
| | HC2 (Hole3): | | | | | | | | | | |
| | Null-LH- | | | | | | | | | | |
| | MSCD334- | | | | | | | | | | |
| | scFv_K447 | | | | | | | | | | |
| VB28B27 | HC1 (Knob3): N- | IgG1, | IgG1 | 955 | Kappa | 978 | IgG1 | 991 | NA | NA | B21M; |
| | term: B21M-Fab, | Kappa, | | | | | | | | | 12782L_19, |
| | C-term: Null- | IgG1 | | | | | | | | | Null-LH- |
| | LH-MSCD334- | | | | | | | | | | MSCD334 |
| | scFv; HC2 | | | | | | | | | | |
| | (Hole3): Null- | | | | | | | | | | |
| | LH-MSCD334- | | | | | | | | | | |
| | scFv_K447 | | | | | | | | | | |
| VB28B28 | HC1 (Knob3): | IgG1, | IgG1 | 1048 | NA | NA | IgG1 | 1050 | Kappa | 1051 | PSMB410_PS |
| | Vb17-B17B21- | IgG1, | | | | | | | | | 3F63, |
| | N33S-LH-scFv; | Kappa | | | | | | | | | Vb17- |
| | HC2 (Hole3-RF): | | | | | | | | | | B17B21-LC- |
| | CD28B19-Fab-RF, | | | | | | | | | | N33S |
| | LC-N-term: | | | | | | | | | | |
| | PSMB410-LH-scFv | | | | | | | | | | |
| VB28B29 | HC1 (Knob3): | IgG1, | IgG1 | 956 | NA | NA | IgG1 | 992 | Kappa | 1007 | PSMB410_PS |
| | Null-scFv; HC2 | IgG1, | | | | | | | | | 3F63, |
| | (Hole3-RF): | Kappa | | | | | | | | | Null-LH- |
| | CD28B19-Fab-RF, | | | | | | | | | | MSCD334 |
| | LC-N-term: | | | | | | | | | | |
| | PSMB410-LH-scFv | | | | | | | | | | |
| VB28B31 | HC1 (Knob3): | IgG1, | IgG1 | 957 | NA | NA | IgG1 | 993 | Kappa | 1008 | PSMB410_PS |
| | PSMB410-LH- | IgG1, | | | | | | | | | 3F63 |
| | scFv; HC2 | Kappa | | | | | | | | | |
| | (Hole3-RF): | | | | | | | | | | |
| | CD28B19-Fab-RF | | | | | | | | | | |
| VB28B32 | HC1 (Knob3): | IgG1, | IgG1 | 958 | NA | NA | IgG1 | 994 | Kappa | 1009 | PSMB410_PS |
| | PSMB410-LH- | IgG1, | | | | | | | | | 3F63, |
| | scFv; HC2 | Kappa | | | | | | | | | Vb17- |
| | (Hole3-RF): | | | | | | | | | | B17B21-LC- |
| | CD28B19-Fab-RF, | | | | | | | | | | N33S, |
| | LC-N-term: | | | | | | | | | | C28B19; |
| | Vb17-B17B21- | | | | | | | | | | C28F72 |
| | N33S-LH-scFv | | | | | | | | | | |
| VB28B33 | HC1 (Knob3): | IgG1, | IgG1 | 959 | NA | NA | IgG1 | 995 | Kappa | 1010 | Vb17- |
| | Null-scFv; HC2 | IgG1, | | | | | | | | | B17B21-LC- |
| | (Hole3-RF): | Kappa | | | | | | | | | N33S, |
| | CD28B19-Fab-RF, | | | | | | | | | | C28B19; |
| | LC-N-term: | | | | | | | | | | C28F72, |
| | Vb17-B17B21- | | | | | | | | | | Null-LH- |
| | N33S-LH-scFv | | | | | | | | | | MSCD334 |
| VB28B35 | HC1 (Knob3): | IgG1, | IgG1 | 960 | NA | NA | IgG1 | 996 | Kappa | 1011 | BCMB519, |
| | Vb17-B17B21- | IgG1, | | | | | | | | | Vb17- |
| | N33S-LH-scFv; | Kappa | | | | | | | | | B17B21-LC- |
| | HC2 (Hole3-RF): | | | | | | | | | | N33S |
| | CD28B19-Fab-RF, | | | | | | | | | | |
| | LC-N-term: | | | | | | | | | | |
| | BCMB519-LH-scFv | | | | | | | | | | |
| VB28B36 | HC1 (Knob3): | IgG1, | IgG1 | 961 | NA | NA | IgG1 | 997 | Kappa | 1012 | BCMB519, |
| | Null-scFv; HC2 | IgG1, | | | | | | | | | Null-LH- |
| | (Hole3-RF): | Kappa | | | | | | | | | MSCD334 |
| | CD28B19-Fab-RF, | | | | | | | | | | |
| | LC-N-term: | | | | | | | | | | |
| | BCMB519-LH-scFv | | | | | | | | | | |
| VB28B38 | HC1 (Knob3): | IgG1, | IgG1 | 962 | NA | NA | IgG1 | 998 | Kappa | 1013 | BCMB519 |
| | BCMB519-LH- | IgG1, | | | | | | | | | |
| | scFv; HC2 | Kappa | | | | | | | | | |
| | (Hole3-RF): | | | | | | | | | | |
| | CD28B19-Fab-RF | | | | | | | | | | |
| VB28B39 | HC1 (Knob3): | IgG1, | IgG1 | 963 | NA | NA | IgG1 | 999 | Kappa | 1014 | BCMB519, |
| | BCMB519-LH- | IgG1, | | | | | | | | | Vb17- |
| | scFv; HC2 | Kappa | | | | | | | | | B17B21-LC- |
| | (Hole3-RF): | | | | | | | | | | N33S, |
| | CD28B19-Fab-RF, | | | | | | | | | | C28B19; |
| | LC-N-term: | | | | | | | | | | C28F72 |
| | Vb17-B17B21- | | | | | | | | | | |
| | N33S-LH-scFv | | | | | | | | | | |
| VB28B40 | HC1 (Knob3): | IgG1, | IgG1 | 964 | NA | 965 | IgG1 | 1000 | Kappa | 1015 | BCMB519, |
| | Vb17-B17B21- | IgG1, | | | | | | | | | B21M; |
| | N33S-LH-scFv; | Kappa | | | | | | | | | 12782L_19, |
| | HC2 (Hole3-RF): | | | | | | | | | | Vb17- |
| | B21M-Fab-RF, | | | | | | | | | | B17B21-LC- |
| | LC-N-term: | | | | | | | | | | N33S |
| | BCMB519-LH-scFv | | | | | | | | | | |

[0831] It will be appreciated by those skilled in the art that changes could be made to the embodiments described above without departing from the broad inventive concept thereof. It is understood, therefore, that this invention is not limited to the particular embodiments disclosed, but it is intended to cover modifications within the spirit and scope of the present invention as defined by the present description.

The application's sequence listing, which the Patent Office published only in electronic form, follows.

SEQUENCE LISTING (1085 sequences)

SEQ ID NO: 1 - protein, 11 aa, Artificial Sequence
  Description of Artificial Sequence: Synthetic peptide
  B17B01 HCDR1
GYSITSGYFWN

SEQ ID NO: 2 - protein, 9 aa, Artificial Sequence
  Description of Artificial Sequence: Synthetic peptide
  B17B01 HCDR2
YISYDGSNN

SEQ ID NO: 3 - protein, 11 aa, Artificial Sequence
  Description of Artificial Sequence: Synthetic peptide
  B17B01 HCDR3
PSPGTGYAVDY

SEQ ID NO: 4 - protein, 16 aa, Artificial Sequence
  Description of Artificial Sequence: Synthetic peptide
  B17B01 LCDR1
RSSQSLVHSNGNTYLH

SEQ ID NO: 5 - protein, 7 aa, Artificial Sequence
  Description of Artificial Sequence: Synthetic peptide
  B17B01 LCDR2
KVSNRFS

SEQ ID NO: 6 - protein, 9 aa, Artificial Sequence
  Description of Artificial Sequence: Synthetic peptide
  B17B01 LCDR3
SQSTHVPFT

SEQ ID NO: 7 - protein, 444 aa, Artificial Sequence
  Description of Artificial Sequence: Synthetic polypeptide
  B17B01 Heavy Chain
NVQLQESGPGLVKPSQSLSLTCSVAGYSITSGYFWNWIRQFPGNKLEWMGYISYDGSNNYNPSLKNRISITRDTSKNQFFLKLNSVTTEDTATYYCASPSPGTGYAVDYWGQGTSVTVSSAKTTPPSVYPLAPGSAAQTNSMVTLGCLVKGYFPEPVTVTWNSGSLSSGVHTFPAVLQSDLYTLSSSVTVPSSTWPSQTVTCNVAHPASSTKVDKKIVPRDCGCKPCICTVPEVSSVFIFPPKPKDVLTITLTPKVTCVVVDISKDDPEVQFSWFVDDVEVHTAQTKPREEQINSTFRSVSELPIMHQDWLNGKEFKCRVNSAAFPAPIEKTISKTYGRPKAPQVYTIPPPKEQMAKDKVSLTCMITNFFPEDITVEWQWNGQPAENYKNTQPIMDTDGSYFVYSKLNVQKSNWEAGNTFTCSVLHEGLHNHHTEKSLSHSPGK

SEQ ID NO: 8 - protein, 219 aa, Artificial Sequence
  Description of Artificial Sequence: Synthetic polypeptide
  B17B01 Light Chain
NVVMTQTPLSLPVSLGDQASISCRSSQSLVHSNGNTYLHWYLQKPGQSPKFLIYKVSNRFSGVPDRFSGGGSGTEFTLKISRVEAEDLGVYFCSQSTHVPFTFGSGTKLEIKRADAAPTVSIFPPSSEQLTSGGASVVCFLNNFYPKDINVKWKIDGSERQNGVLNSWTDQDSKDSTYSMSSTLTLTKDEYERHNSYTCEATHKTSTSPIVKSFNRNEC

SEQ ID NO: 9 - protein, 447 aa, Artificial Sequence
  Description of Artificial Sequence: Synthetic polypeptide
  B17B1 Heavy Chain
NVQLQESGPGLVKPSQSLSLTCSVAGYSITSGYFWNWIRQFPGNKLEWMGYISYDGSNNYNPSLKNRISITRDTSKNQFFLKLNSVTTEDTATYYCASPSPGTGYAVDYWGQGTSVTVSSASTKGPSVFPLAPCSRSTSESTAALGCLVKDYFPEPVTVSWNSGALTSGVHTFPAVLQSSGLYSLSSVVTVPSSSLGTKTYTCNVDHKPSNTKVDKRVESKYGPPCPPCPAPEAAGGPSVFLFPPKPKDTLMISRTPEVTCVVVDVSQEDPEVQFNWYVDGVEVHNAKTKPREEQFNSTYRVVSVLTVLHQDWLNGKEYKCKVSNKGLPSSIEKTISKAKGQPREPQVYTLPPSQEEMTKNQVSLTCLVKGFYPSDIAVEWESNGQPENNYKTTPPVLDSDGSFLLYSKLTVDKSRWQEGNVFSCSVMHEALHNHYTQKSLSLSLGK

SEQ ID NO: 10 - protein, 219 aa, Artificial Sequence; identical to SEQ ID NO: 8
  Description of Artificial Sequence: Synthetic polypeptide
  B17B1 Light Chain

SEQ ID NO: 11 - protein, 447 aa, Artificial Sequence
  Description of Artificial Sequence: Synthetic polypeptide
  B17B2 Heavy Chain
DVQLKESGPGLVKPSQSLSVTCSVTGYSITSGYYWNWYRQFPGNKLEWMGYISYDGSNNYNPSLKNRISITRDTSKNQILLKLTYVTTEDTATYYCTRPSPGTGYAVDYWGQGTLVTVSSASTKGPSVFPLAPCSRSTSESTAALGCLVKDYFPEPVTVSWNSGALTSGVHTFPAVLQSSGLYSLSSVVTVPSSSLGTKTYTCNVDHKPSNTKVDKRVESKYGPPCPPCPAPEAAGGPSVFLFPPKPKDTLMISRTPEVTCVVVDVSQEDPEVQFNWYVDGVEVHNAKTKPREEQFNSTYRVVSVLTVLHQDWLNGKEYKCKVSNKGLPSSIEKTISKAKGQPREPQVYTLPPSQEEMTKNQVSLTCLVKGFYPSDIAVEWESNGQPENNYKTTPPVLDSDGSFLLYSKLTVDKSRWQEGNVFSCSVMHEALHNHYTQKSLSLSLGK

SEQ ID NO: 12 - protein, 219 aa, Artificial Sequence
  Description of Artificial Sequence: Synthetic polypeptide
  B17B2 Light Chain
DIVMTQSPDSLAVSLGERATINCRSSQSLVHSNGNTYLHWYQQKPGQPPKLLIYKVSNRFSGVPDRFSGSGSGTDFTLTISSLQAEDVAVYYCSQSTHVPFTFGQGTKVEIKRADAAPTVSIFPPSSEQLTSGGASVVCFLNNFYPKDINVKWKIDGSERQNGVLNSWTDQDSKDSTYSMSSTLTLTKDEYERHNSYTCEATHKTSTSPIVKSFNRNEC

SEQ ID NO: 13 - protein, 447 aa, Artificial Sequence
  Description of Artificial Sequence: Synthetic polypeptide
  B17B21 Heavy Chain
QVQLQESGPGLVKPSETLSLTCTVSGYSITSGYFWNWIRQPPGKGLEWIGYISYDGSNNYNPSLKSRVTISRDTSKNQFSLKLSSVTAADTAVYYCASPSPGTGYAVDYWGQGTLVTVSSASTKGPSVFPLAPCSRSTSESTAALGCLVKDYFPEPVTVSWNSGALTSGVHTFPAVLQSSGLYSLSSVVTVPSSSLGTKTYTCNVDHKPSNTKVDKRVESKYGPPCPPCPAPEAAGGPSVFLFPPKPKDTLMISRTPEVTCVVVDVSQEDPEVQFNWYVDGVEVHNAKTKPREEQFNSTYRVVSVLTVLHQDWLNGKEYKCKVSNKGLPSSIEKTISKAKGQPREPQVYTLPPSQEEMTKNQVSLSCAVKGFYPSDIAVEWESNGQPENNYKTTPPVLDSDGSFFLVSRLTVDKSRWQEGNVFSCSVMHEALHNRFTQKSLSLSLGK

SEQ ID NO: 14 - protein, 219 aa, Artificial Sequence
  Description of Artificial Sequence: Synthetic polypeptide
  B17B21 Light Chain
DIQMTQSPSSLSASVGDRVTITCRSSQSLVHSNGNTYLHWYQQKPGKAPKFLIYKVSNRFSGVPSRFSGSGSGTDFTLTISSLQPEDFATYYCSQSTHVPFTFGQGTKLEIKRTVAAPSVFIFPPSDEQLKSGTASVVCLLNNFYPREAKVQWKVDNALQSGNSQESVTEQDSKDSTYSLSSTLTLSKADYEKHKVYACEVTHQGLSSPVTKSFNRGEC

SEQ ID NO: 15-16 - skipped (2 entries)

SEQ ID NO: 17 - protein, 447 aa, Artificial Sequence
  Description of Artificial Sequence: Synthetic polypeptide
  Null Heavy Chain
QITLKESGPTLVKPTQTLTLTCTFSGFSLSTSGMGVSWIRQPPGKALEWLAHIYWDDDKRYNPSLKSRLTITKDTSKNQVVLTMTNMDPVDTATYYCARLYGFTYGFAYWGQGTLVTVSSASTKGPSVFPLAPCSRSTSESTAALGCLVKDYFPEPVTVSWNSGALTSGVHTFPAVLQSSGLYSLSSVVTVPSSSLGTKTYTCNVDHKPSNTKVDKRVESKYGPPCPPCPAPEAAGGPSVFLFPPKPKDTLMISRTPEVTCVVVDVSQEDPEVQFNWYVDGVEVHNAKTKPREEQFNSTYRVVSVLTVLHQDWLNGKEYKCKVSNKGLPSSIEKTISKAKGQPREPQVYTLPPSQEEMTKNQVSLWCLVKGFYPSDIAVEWESNGQPENNYKTTPPVLDSDGSFFLYSRLTVDKSRWQEGNVFSCSVMHEALHNHYTQKSLSLSLGK

SEQ ID NO: 18 - protein, 218 aa, Artificial Sequence
  Description of Artificial Sequence: Synthetic polypeptide
  Null Light Chain
DIVMTQSPDSLAVSLGERATINCRASQSVDYNGISYMHWYQQKPGQPPKLLIYAASNPESGVPDRFSGSGSGTDFTLTISSLQAEDVAVYYCQQIIEDPWTFGQGTKVEIKRTVAAPSVFIFPPSDEQLKSGTASVVCLLNNFYPREAKVQWKVDNALQSGNSQESVTEQDSKDSTYSLSSTLTLSKADYEKHKVYACEVTHQGLSSPVTKSFNRGEC

SEQ ID NO: 19 - protein, 119 aa, Artificial Sequence
  Description of Artificial Sequence: Synthetic polypeptide
  B17H3
EVQLLESGGGLVQPGGSLRLSCAASGYSITSGYFWNWVRQAPGKGLEWVSYISYDGSNNYADSVKGRFTISRDNSKNTLYLQMNSLRAEDTAVYYCAKPSPGTGYAVDYWGQGTLVTVS

SEQ ID NO: 20 - protein, 120 aa, Artificial Sequence
  Description of Artificial Sequence: Synthetic polypeptide
  B17H4
EVQLLESGGGLVQPGGSLRLSCAASGYSITSGYFWNWVRQAPGKGLEWVSYISYDGSNNYADSVKGRFTISRDNSKNTLYLQMNSLRAEDTAVYYCASPSPGTGYAVDYWGQGTLVTVSS

SEQ ID NO: 21 - protein, 120 aa, Artificial Sequence
  Description of Artificial Sequence: Synthetic polypeptide
  B17H5
QVQLQESGPGLVKPSETLSLTCTVSGYSITSGYFWNWIRQPPGKGLEWIGYISYDGSNNYNPSLKSRVTISRDTSKNQFSLKLSSVTAADTAVYYCASPSPGTGYAVDYWGQGTLVTVSS

SEQ ID NO: 22 - protein, 112 aa, Artificial Sequence
  Description of Artificial Sequence: Synthetic polypeptide
  B17L3
DIQMTQSPSSLSASVGDRVTITCRSSQSLVHSNGNTYLHWYQQKPGKAPKLLIYKVSNRFSGVPSRFSGSGSGTDFTLTISSLQPEDFATYYCSQSTHVPFTFGQGTKLEIK

SEQ ID NO: 23 - protein, 112 aa, Artificial Sequence
  Description of Artificial Sequence: Synthetic polypeptide
  B17L4
DIQMTQSPSSLSASVGDRVTITCRSSQSLVHSNGNTYLHWYQQKPGKAPKFLIYKVSNRFSGVPSRFSGSGSGTDFTLTISSLQPEDFATYYCSQSTHVPFTFGQGTKLEIK

SEQ ID NO: 24 - protein, 112 aa, Artificial Sequence
  Description of Artificial Sequence: Synthetic polypeptide
  B17L5
DVVMTQSPLSLPVTLGQPASISCRSSQSLVHSNGNTYLHWFQQRPGQSPRFLIYKVSNRFSGVPDRFSGSGSGTDFTLKISRVEAEDVGVYYCSQSTHVPFTFGQGTKLEIK

SEQ ID NO: 25 - protein, 120 aa, Artificial Sequence
  Description of Artificial Sequence: Synthetic polypeptide
  B17H1
NVQLQESGPGLVKPSQSLSLTCSVAGYSITSGYFWNWIRQFPGNKLEWMGYISYDGSNNYNPSLKNRISITRDTSKNQFFLKLNSVTTEDTATYYCASPSPGTGYAVDYWGQGTSVTVSS

SEQ ID NO: 26 - protein, 112 aa, Artificial Sequence
  Description of Artificial Sequence: Synthetic polypeptide
  B17L1
NVVMTQTPLSLPVSLGDQASISCRSSQSLVHSNGNTYLHWYLQKPGQSPKFLIYKVSNRFSGVPDRFSGGGSGTEFTLKISRVEAEDLGVYFCSQSTHVPFTFGSGTKLEIK

SEQ ID NO: 27 - protein, 493 aa, Artificial Sequence
  Description of Artificial Sequence: Synthetic polypeptide
  TCR-Vbeta17_Fc fusion
MAWVWTLLFLMAAAQSIQAVDGGITQSPKYLFRKEGQNVTLSCEQNLNHDAMYWYRQDPGQGLRLIYYSQIVNDFQKGDIAEGYSVSREKKESFPLTVTSAQKNPTAFYLCASSSRSSYEQYFGPGTRLTVTEDLKNVFPPEVAVFEPSEAEISHTQKATLVCLATGFYPDHVELSWWVNGKEVHSGVSTDPQPLKEQPALNDSRYSLSSRLRVSATFWQNPRNHFRCQVQFYGLSENDEWTQDRAKPVTQIVSAEAWGRADEPKSCDKTHTCPPCPAPELLGGPSVFLFPPKPKDTLMISRTPEVTCVVVDVSHEDPEVKFNWYVDGVEVHNAKTKPREEQYNSTYRVVSVLTVLHQDWLNGKEYKCKVSNKALPAPIEKTISKAKGQPREPQVYVLPPSREEMTKNQVSLLCLVKGFYPSDIAVEWESNGQPENNYLTWPPVLDSDGSFFLYSKLTVDKSRWQQGNVFSCSVMHEALHNHYTQKSLSLSPG

SEQ ID NO: 28 - protein, 719 aa, Artificial Sequence
  Description of Artificial Sequence: Synthetic polypeptide
  B17B21 half antibody
MAWVWTLLFLMAAAQSIQADIQMTQSPSSLSASVGDRVTITCRSSQSLVHSNGNTYLHWYQQKPGKAPKFLIYKVSNRFSGVPSRFSGSGSGTDFTLTISSLQPEDFATYYCSQSTHVPFTFGQGTKLEIKRTVAAPSVFIFPPSDEQLKSGTASVVCLLNNFYPREAKVQWKVDNALQSGNSQESVTEQDSKDSTYSLSSTLTLSKADYEKHKVYACEVTHQGLSSPVTKSFNRGECGGSEGKSSGSGSESKSTEGKSSGSGSESKSTGGSQVQLQESGPGLVKPSETLSLTCTVSGYSITSGYFWNWIRQPPGKGLEWIGYISYDGSNNYNPSLKSRVTISRDTSKNQFSLKLSSVTAADTAVYYCASPSPGTGYAVDYWGQGTLVTVSSASTKGPSVFPLAPCSRSTSESTAALGCLVKDYFPEPVTVSWNSGALTSGVHTFPAVLQSSGLYSLSSVVTVPSSSLGTKTYTCNVDHKPSNTKVDKRVESKYGPPCPPCPAPEAAGGPSVFLFPPKPKDTLMISRTPEVTCVVVDVSQEDPEVQFNWYVDGVEVHNAKTKPREEQFNSTYRVVSVLTVLHQDWLNGKEYKCKVSNKGLPSSIEKTISKAKGQPREPQVYTLPPSQEEMTKNQVSLSCAVKGFYPSDIAVEWESNGQPENNYKTTPPVLDSDGSFFLVSRLTVDKSRWQEGNVFSCSVMHEALHNRFTQKSLSLSLGK

SEQ ID NO: 29 - DNA, 4320 bp, Artificial Sequence
  Description of Artificial Sequence: Synthetic polynucleotide
  B17B21 half antibody
atggcctgggtgtggaccctgctgttcctgatggccgccgcccagagcatccaggccgacatccagatgacccagagcccaagcagcctgagcgccagcgtgggcgaccgcgtgaccatcacctgccgcagcagccagagcctggtgcacagcaacggcaacacctacctgcactggtaccagcagaagccaggcaaggccccaaagttcctgatctacaaggtgagcaaccgcttcagcggcgtgccaagccgcttcagcggcagcggcagcggcaccgacttcaccctgaccatcagcagcctgcagccagaggacttcgccacctactactgcagccagagcacccacgtgccattcaccttcggccagggcaccaagctggagatcaagcgcaccgtggccgccccaagcgtgttcatcttcccaccaagcgacgagcagctgaagagcggcaccgccagcgtggtgtgcctgctgaacaacttctacccacgcgaggccaaggtgcagtggaaggtggacaacgccctgcagagcggcaacagccaggagagcgtgaccgagcaggacagcaaggacagcacctacagcctgagcagcaccctgaccctgagcaaggccgactacgagaagcacaaggtgtacgcctgcgaggtgacccaccagggcctgagcagcccagtgaccaagagcttcaaccgcggcgagtgcggcggcagcgagggcaagagcagcggcagcggcagcgagagcaagagcaccgagggcaagagcagcggcagcggcagcgagagcaagagcaccggcggcagccaggtgcagctgcaggagagcggcccaggcctggtgaagccaagcgagaccctgagcctgacctgcaccgtgagcggctacagcatcaccagcggctacttctggaactggatccgccagccaccaggcaagggcctggagtggatcggctacatcagctacgacggcagcaacaactacaacccaagcctgaagagccgcgtgaccatcagccgcgacaccagcaagaaccagttcagcctgaagctgagcagcgtgaccgccgccgacaccgccgtgtactactgcgccagcccaagcccaggcaccggctacgccgtggactactggggccagggcaccctggtgaccgtgagcagcgccagcaccaagggcccaagcgtgttcccactggccccatgcagccgcagcaccagcgagagcaccgccgccctgggctgcctggtgaaggactacttcccagagccagtgaccgtgagctggaacagcggcgccctgaccagcggcgtgcacaccttcccagccgtgctgcagagcagcggcctgtacagcctgagcagcgtggtgaccgtgccaagcagcagcctgggcaccaagacctacacctgcaacgtggaccacaagccaagcaacaccaaggtggacaagcgcgtggagagcaagtacggcccaccatgcccaccatgcccagccccagaggccgccggcggcccaagcgtgttcctgttcccaccaaagccaaaggacaccctgatgatcagccgcaccccagaggtgacctgcgtggtggtggacgtgagccaggaggacccagaggtgcagttcaactggtacgtggacggcgtggaggtgcacaacgccaagaccaagccacgcgaggagcagttcaacagcacctaccgcgtggtgagcgtgctgaccgtgctgcaccaggactggctgaacggcaaggagtacaagtgcaaggtgagcaacaagggcctgccaagcagcatcgagaagaccatcagcaaggccaagggccagccacgcgagccacaggtgtacaccctgccaccaagccaggaggagatgaccaagaaccaggtgagcctgagctgcgccgtgaagggcttctacccaagcgacatcgccgtggagtgggagagcaacggccagccagagaacaactacaagaccaccccaccagtgctggacagcgacggcagcttcttcctggtgagccgcctgaccgtggacaagagccgctggcaggagggcaacgtgttcagctgcagcgtgatgcacgaggccctgcacaaccgcttcacccagaagagcctgagcctgagcctgggcaagatggcctgggtgtggaccctgctgttcctgatggccgccgcccagagcatccaggccgacatccagatgacccagagcccaagcagcctgagcgccagcgtgggcgaccgcgtgaccatcacctgccgcagcagccagagcctggtgcacagcaacggcaacacctacctgcactggtaccagcagaagccaggcaaggccccaaagttcctgatctacaaggtgagcaaccgcttcagcggcgtgccaagccgcttcagcggcagcggcagcggcaccgacttcaccctgaccatcagcagcctgcagccagaggacttcgccacctactactgcagccagagcacccacgtgccattcaccttcggccagggcaccaagctggagatcaagcgcaccgtggccgccccaagcgtgttcatcttcccaccaagcgacgagcagctgaagagcggcaccgccagcgtggtgtgcctgctgaacaacttctacccacgcgaggccaaggtgcagtggaaggtggacaacgccctgcagagcggcaacagccaggagagcgtgaccgagcaggacagcaaggacagcacctacagcctgagcagcaccctgaccctgagcaaggccgactacgagaagcacaaggtgtacgcctgcgaggtgacccaccagggcctgagcagcccagtgaccaagagcttcaaccgcggcgagtgcggcggcagcgagggcaagagcagcggcagcggcagcgagagcaagagcaccgagggcaagagcagcggcagcggcagcgagagcaagagcaccggcggcagccaggtgcagctgcaggagagcggcccaggcctggtgaagccaagcgagaccctgagcctgacctgcaccgtgagcggctacagcatcaccagcggctacttctggaactggatccgccagccaccaggcaagggcctggagtggatcggctacatcagctacgacggcagcaacaactacaacccaagcctgaagagccgcgtgaccatcagccgcgacaccagcaagaaccagttcagcctgaagctgagcagcgtgaccgccgccgacaccgccgtgtactactgcgccagcccaagcccaggcaccggctacgccgtggactactggggccagggcaccctggtgaccgtgagcagcgccagcaccaagggcccaagcgtgttcccactggccccatgcagccgcagcaccagcgagagcaccgccgccctgggctgcctggtgaaggactacttcccagagccagtgaccgtgagctggaacagcggcgccctgaccagcggcgtgcacaccttcccagccgtgctgcagagcagcggcctgtacagcctgagcagcgtggtgaccgtgccaagcagcagcctgggcaccaagacctacacctgcaacgtggaccacaagccaagcaacaccaaggtggacaagcgcgtggagagcaagtacggcccaccatgcccaccatgcccagccccagaggccgccggcggcccaagcgtgttcctgttcccaccaaagccaaaggacaccctgatgatcagccgcaccccagaggtgacctgcgtggtggtggacgtgagccaggaggacccagaggtgcagttcaactggtacgtggacggcgtggaggtgcacaacgccaagaccaagccacgcgaggagcagttcaacagcacctaccgcgtggtgagcgtgctgaccgtgctgcaccaggactggctgaacggcaaggagtacaagtgcaaggtgagcaacaagggcctgccaagcagcatcgagaagaccatcagcaaggccaagggccagccacgcgagccacaggtgtacaccctgccaccaagccaggaggagatgaccaagaaccaggtgagcctgagctgcgccgtgaagggcttctacccaagcgacatcgccgtggagtgggagagcaacggccagccagagaacaactacaagaccaccccaccagtgctggacagcgacggcagcttcttcctggtgagccgcctgaccgtggacaagagccgctggcaggagggcaacgtgttcagctgcagcgtgatgcacgaggccctgcacaaccgcttcacccagaagagcctgagcctgagcctgggcaagtgatag

SEQ ID NO: 30 - skipped

SEQ ID NO: 31 - DNA, 2139 bp, Artificial Sequence
  Description of Artificial Sequence: Synthetic polynucleotide
  I3RB217 half antibody
atggcctgggtgtggaccctgctgttcctgatggccgccgcccagagcatccaggccgagatcgtgctgacccagagcccaggcaccctgagcctgagcccaggcgagcgcgccaccctgagctgccgcgccagccagagcgtgagcagcagctacctggcctggtaccagcagaagccaggccaggccccacgcctgctgatctacggcgccagcagccgcgccaccggcatcccagaccgcttcagcggcagcggcagcggcaccgacttcaccctgaccatcagccgcctggagccagaggacttcgccgtgtactactgccagcaggactacggcttcccatggaccttcggccagggcaccaaggtggagatcaagcgcaccgtggccgccccaagcgtgttcatcttcccaccaagcgacgagcagctgaagagcggcaccgccagcgtggtgtgcctgctgaacaacttctacccacgcgaggccaaggtgcagtggaaggtggacaacgccctgcagagcggcaacagccaggagagcgtgaccgagcaggacagcaaggacagcacctacagcctgagcagcaccctgaccctgagcaaggccgactacgagaagcacaaggtgtacgcctgcgaggtgacccaccagggcctgagcagcccagtgaccaagagcttcaaccgcggcgagtgcggcggcagcgagggcaagagcagcggcagcggcagcgagagcaagagcaccgagggcaagagcagcggcagcggcagcgagagcaagagcaccggcggcagcgaggtgcagctggtgcagagcggcgccgaggtgaagaagccaggcgagagcctgaagatcagctgcaagggcagcggctacagcttcaccagctactggatcagctgggtgcgccagatgccaggcaagggcctggagtggatgggcatcatcgacccaagcgacagcgacacccgctacagcccaagcttccagggccaggtgaccatcagcgccgacaagagcatcagcaccgcctacctgcagtggagcagcctgaaggccagcgacaccgccatgtactactgcgcccgcggcgacggcagcaccgacctggactactggggccagggcaccctggtgaccgtgagcagcgccagcaccaagggcccaagcgtgttcccactggccccatgcagccgcagcaccagcgagagcaccgccgccctgggctgcctggtgaaggactacttcccagagccagtgaccgtgagctggaacagcggcgccctgaccagcggcgtgcacaccttcccagccgtgctgcagagcagcggcctgtacagcctgagcagcgtggtgaccgtgccaagcagcagcctgggcaccaagacctacacctgcaacgtggaccacaagccaagcaacaccaaggtggacaagcgcgtggagagcaagtacggcccaccatgcccaccatgcccagccccagaggccgccggcggcccaagcgtgttcctgttcccaccaaagccaaaggacaccctgatgatcagccgcaccccagaggtgacctgcgtggtggtggacgtgagccaggaggacccagaggtgcagttcaactggtacgtggacggcgtggaggtgcacaacgccaagaccaagccacgcgaggagcagttcaacagcacctaccgcgtggtgagcgtgctgaccgtgctgcaccaggactggctgaacggcaaggagtacaagtgcaaggtgagcaacaagggcctgccaagcagcatcgagaagaccatcagcaaggccaagggccagccacgcgagccacaggtgtacaccctgccaccaagccaggaggagatgaccaagaaccaggtgagcctgtggtgcctggtgaagggcttctacccaagcgacatcgccgtggagtgggagagcaacggccagccagagaacaactacaagaccaccccaccagtgctggacagcgacggcagcttcttcctgtacagccgcctgaccgtggacaagagccgctggcaggagggcaacgtgttcagctgcagcgtgatgcacgaggccctgcacaaccactacacccagaagagcctgagcctgagcctgggcaag

SEQ ID NO: 32 - protein, 713 aa, Artificial Sequence
  Description of Artificial Sequence: Synthetic polypeptide
  B23B49 half antibody
MAWVWTLLFLMAAAQSIQAEIVLTQSPGTLSLSPGERATLSCRASQSVSSSYLAWYQQKPGQAPRLLIYGASSRATGIPDRFSGSGSGTDFTLTISRLEPEDFAVYYCQQDYGFPWTFGQGTKVEIKRTVAAPSVFIFPPSDEQLKSGTASVVCLLNNFYPREAKVQWKVDNALQSGNSQESVTEQDSKDSTYSLSSTLTLSKADYEKHKVYACEVTHQGLSSPVTKSFNRGECGGSEGKSSGSGSESKSTEGKSSGSGSESKSTGGSEVQLVQSGAEVKKPGESLKISCKGSGYSFTSYWISWVRQMPGKGLEWMGIIDPSDSDTRYSPSFQGQVTISADKSISTAYLQWSSLKASDTAMYYCARGDGSTDLDYWGQGTLVTVSSASTKGPSVFPLAPCSRSTSESTAALGCLVKDYFPEPVTVSWNSGALTSGVHTFPAVLQSSGLYSLSSVVTVPSSSLGTKTYTCNVDHKPSNTKVDKRVESKYGPPCPPCPAPEAAGGPSVFLFPPKPKDTLMISRTPEVTCVVVDVSQEDPEVQFNWYVDGVEVHNAKTKPREEQFNSTYRVVSVLTVLHQDWLNGKEYKCKVSNKGLPSSIEKTISKAKGQPREPQVYTLPPSQEEMTKNQVSLWCLVKGFYPSDIAVEWESNGQPENNYKTTPPVLDSDGSFFLYSRLTVDKSRWQEGNVFSCSVMHEALHNHYTQKSLSLSLGK

SEQ ID NO: 33 - DNA, 2154 bp, Artificial Sequence
  Description of Artificial Sequence: Synthetic polynucleotide
  B23B49 half antibody
atggcctgggtgtggaccctgctgttcctgatggccgccgcccagagcatccaggccgacatcgtgatgacccagagcccagacagcctggccgtgagcctgggcgagcgcgccaccatcaactgccgcgccagccagagcgtggactacaacggcatcagctacatgcactggtaccagcagaagccaggccagccaccaaagctgctgatctacgccgccagcaacccagagagcggcgtgccagaccgcttcagcggcagcggcagcggcaccgacttcaccctgaccatcagcagcctgcaggccgaggacgtggccgtgtactactgccagcagatcatcgaggacccatggaccttcggccagggcaccaaggtggagatcaagcgcaccgtggccgccccaagcgtgttcatcttcccaccaagcgacgagcagctgaagagcggcaccgccagcgtggtgtgcctgctgaacaacttctacccacgcgaggccaaggtgcagtggaaggtggacaacgccctgcagagcggcaacagccaggagagcgtgaccgagcaggacagcaaggacagcacctacagcctgagcagcaccctgaccctgagcaaggccgactacgagaagcacaaggtgtacgcctgcgaggtgacccaccagggcctgagcagcccagtgaccaagagcttcaaccgcggcgagtgcggcggcagcgagggcaagagcagcggcagcggcagcgagagcaagagcaccgagggcaagagcagcggcagcggcagcgagagcaagagcaccggcggcagccagatcaccctgaaggagagcggcccaaccctggtgaagccaacccagaccctgaccctgacctgcaccttcagcggcttcagcctgagcaccagcggcatgggcgtgagctggatccgccagccaccaggcaaggccctggagtggctggcccacatctactgggacgacgacaagcgctacaacccaagcctgaagagccgcctgaccatcaccaaggacaccagcaagaaccaggtggtgctgaccatgaccaacatggacccagtggacaccgccacctactactgcgcccgcctgtacggcttcacctacggcttcgcctactggggccagggcaccctggtgaccgtgagcagcgccagcaccaagggcccaagcgtgttcccactggccccatgcagccgcagcaccagcgagagcaccgccgccctgggctgcctggtgaaggactacttcccagagccagtgaccgtgagctggaacagcggcgccctgaccagcggcgtgcacaccttcccagccgtgctgcagagcagcggcctgtacagcctgagcagcgtggtgaccgtgccaagcagcagcctgggcaccaagacctacacctgcaacgtggaccacaagccaagcaacaccaaggtggacaagcgcgtggagagcaagtacggcccaccatgcccaccatgcccagccccagaggccgccggcggcccaagcgtgttcctgttcccaccaaagccaaaggacaccctgatgatcagccgcaccccagaggtgacctgcgtggtggtggacgtgagccaggaggacccagaggtgcagttcaactggtacgtggacggcgtggaggtgcacaacgccaagaccaagccacgcgaggagcagttcaacagcacctaccgcgtggtgagcgtgctgaccgtgctgcaccaggactggctgaacggcaaggagtacaagtgcaaggtgagcaacaagggcctgccaagcagcatcgagaagaccatcagcaaggccaagggccagccacgcgagccacaggtgtacaccctgccaccaagccaggaggagatgaccaagaaccaggtgagcctgtggtgcctggtgaagggcttctacccaagcgacatcgccgtggagtgggagagcaacggccagccagagaacaactacaagaccaccccaccagtgctggacagcgacggcagcttcttcctgtacagccgcctgaccgtggacaagagccgctggcaggagggcaacgtgttcagctgcagcgtgatgcacgaggccctgcacaaccactacacccagaagagcctgagcctgagcctgggcaag

SEQ ID NO: 34-41 - skipped (8 entries)

SEQ ID NO: 42 - protein, 11 aa, Artificial Sequence
  Description of Artificial Sequence: Synthetic peptide
  IGHJ1*01 HC
WGQGTLVTVSS

SEQ ID NO: 43 - protein, 10 aa, Artificial Sequence
  Description of Artificial Sequence: Synthetic peptide
  IGKJ2*01 LC
FGQGTKLEIK

SEQ ID NO: 44 - protein, 449 aa, Artificial Sequence
  Description of Artificial Sequence: Synthetic polypeptide
  Va10.2_Fc fusion
MAWVWTLLFLMAAAQSIQAQLLEQSPQFLSIQEGENLTVYCNSSSVFSSLQWYRQEPGEGPVLLVTVVTGGEVKKLKRLTFQFGDARKDSSLHITAAQPGDTGLYLCAGAGSQGNLIFGKGTKLSVKPNIQNPDPAVYQLRDSKSSDKSVCLFTDFDSQTNVSQSKDSDVYITDKTVLDMRSMDFKSNSAVAWSNKSDFACANAFNNSIIPEDTFFPSEPKSCDKTHTCPPCPAPELLGGPSVFLFPPKPKDTLMISRTPEVTCVVVDVSHEDPEVKFNWYVDGVEVHNAKTKPREEQYNSTYRVVSVLTVLHQDWLNGKEYKCKVSNKALPAPIEKTISKAKGQPREPQVYVYPPSREEMTKNQVSLTCLVKGFYPSDIAVEWESNGQPENNYKTTPPVLDSDGSFALVSKLTVDKSRWQQGNVFSCSVMHEALHNHYTQKSLSLSPG

SEQ ID NO: 45 - protein, 11 aa, Artificial Sequence
  Description of Artificial Sequence: Synthetic peptide
GYSITSGYYWN

SEQ ID NO: 46 - protein, 120 aa, Artificial Sequence
  Description of Artificial Sequence: Synthetic polypeptide
DVQLKESGPGLVKPSQSLSVTCSVTGYSITSGYYWNWYRQFPGNKLEWMGYISYDGSNNYNPSLKNRISITRDTSKNQILLKLTYVTTEDTATYYCTRPSPGTGYAVDYWGQGTLVTVSS

SEQ ID NO: 47 - protein, 112 aa, Artificial Sequence
  Description of Artificial Sequence: Synthetic polypeptide
DIVMTQSPDSLAVSLGERATINCRSSQSLVHSNGNTYLHWYQQKPGQPPKLLIYKVSNRFSGVPDRFSGSGSGTDFTLTISSLQAEDVAVYYCSQSTHVPFTFGQGTKVEIK

SEQ ID NO: 48 - protein, 8 aa, Artificial Sequence
  Description of Artificial Sequence: Synthetic peptide
GFSLTSYG

SEQ ID NO: 49 - protein, 7 aa, Artificial Sequence
  Description of Artificial Sequence: Synthetic peptide
IWAGGGT

SEQ ID NO: 50 - protein, 13 aa, Artificial Sequence
  Description of Artificial Sequence: Synthetic peptide
ARGTFFNYDYFDY

SEQ ID NO: 51 - protein, 6 aa, Artificial Sequence
  Description of Artificial Sequence: Synthetic peptide
QDVGTD

SEQ ID NO: 52 - protein, 3 aa, Artificial Sequence
  Description of Artificial Sequence: Synthetic peptide
WAS

SEQ ID NO: 53 - protein, 9 aa, Artificial Sequence
  Description of Artificial Sequence: Synthetic peptide
QQYSRYPWT

SEQ ID NO: 54 - protein, 7 aa, Artificial Sequence
  Description of Artificial Sequence: Synthetic peptide
IWAGGNT

SEQ ID NO: 55 - protein, 13 aa, Artificial Sequence
  Description of Artificial Sequence: Synthetic peptide
ARGSFYSYLYFDY

SEQ ID NO: 56 - protein, 6 aa, Artificial Sequence
  Description of Artificial Sequence: Synthetic peptide
KSISKY

SEQ ID NO: 57 - protein, 3 aa, Artificial Sequence
  Description of Artificial Sequence: Synthetic peptide
SGS

SEQ ID NO: 58 - protein, 9 aa, Artificial Sequence
  Description of Artificial Sequence: Synthetic peptide
QQHNDYPLT

SEQ ID NO: 59 - protein, 8 aa, Artificial Sequence
  Description of Artificial Sequence: Synthetic peptide
GFSLSSYA

SEQ ID NO: 60 - protein, 14 aa, Artificial Sequence
  Description of Artificial Sequence: Synthetic peptide
ARNFFYDYDDGMDY

SEQ ID NO: 61 - protein, 11 aa, Artificial Sequence
  Description of Artificial Sequence: Synthetic peptide
QSLVHSNGNTY

SEQ ID NO: 62 - protein, 3 aa, Artificial Sequence
  Description of Artificial Sequence: Synthetic peptide
KVS

SEQ ID NO: 63 - protein, 9 aa, Artificial Sequence
  Description of Artificial Sequence: Synthetic peptide
SQSTHVPLT

SEQ ID NO: 64 - protein, 8 aa, Artificial Sequence
  Description of Artificial Sequence: Synthetic peptide
GYTFTNYG

SEQ ID NO: 65 - protein, 8 aa, Artificial Sequence
  Description of Artificial Sequence: Synthetic peptide
INTYTGEP

SEQ ID NO: 66 - protein, 12 aa, Artificial Sequence
  Description of Artificial Sequence: Synthetic peptide
ARPYFGDYAMDY

SEQ ID NO: 67 - protein, 6 aa, Artificial Sequence
  Description of Artificial Sequence: Synthetic peptide
ENIYSN

SEQ ID NO: 68 - protein, 3 aa, Artificial Sequence
  Description of Artificial Sequence: Synthetic peptide
TAT

SEQ ID NO: 69 - protein, 9 aa, Artificial Sequence
  Description of Artificial Sequence: Synthetic peptide
QHFWGNPWT

SEQ ID NO: 70 - protein, 8 aa, Artificial Sequence
  Description of Artificial Sequence: Synthetic peptide
GFSLTSYA

SEQ ID NO: 71 - protein, 14 aa, Artificial Sequence
  Description of Artificial Sequence: Synthetic peptide
ARNPFYDYDEGLDY

SEQ ID NO: 72 - protein, 3 aa, Artificial Sequence
  Description of Artificial Sequence: Synthetic peptide
KVS

SEQ ID NO: 73 - protein, 9 aa, Artificial Sequence
  Description of Artificial Sequence: Synthetic peptide
SQSTHVPWT

SEQ ID NO: 74 - protein, 7 aa, Artificial Sequence
  Description of Artificial Sequence: Synthetic peptide
IWAGGNT

SEQ ID NO: 75 - protein, 13 aa, Artificial Sequence
  Description of Artificial Sequence: Synthetic peptide
ARGSFYDYLYFDY

SEQ ID NO: 76 - protein, 9 aa, Artificial Sequence
  Description of Artificial Sequence: Synthetic peptide
QQHNEYPLT

SEQ ID NO: 77 - protein, 119 aa, Artificial Sequence
  Description of Artificial Sequence: Synthetic polypeptide
QVQLKESGPGLVAPSQSLSITCTVSGFSLTSYGVHWVRQPPGKGLEWLGIIWAGGGTNYNSALMSRLSITKDNSKSQVSLKMNSLQTDDTAMYYCARGTFFNYDYFDYWGQGTTLTVSS

SEQ ID NO: 78 - protein, 107 aa, Artificial Sequence
  Description of Artificial Sequence: Synthetic polypeptide
DIVMTQSQKFMSTSVGDRVSITCKASQDVGTDVAWYQQKPGQSPKLMIYWASTRHTGVPDRFTGSGSGTDFTLTISNVQSEDLADYFCQQYSRYPWTFGAGTKLELK

SEQ ID NO: 79 - protein, 119 aa, Artificial Sequence
  Description of Artificial Sequence: Synthetic polypeptide
QVQLKESGPVLVAPSQSLSITCTVSGFSLTSYGVHWVRQPPGKGLEWLGIIWAGGNTNSNSALMSRLSISKDNSKSQVFLKMNSLQTDDTAMYYCARGSFYSYLYFDYWGQGTTLTVSS

SEQ ID NO: 80 - protein, 107 aa, Artificial Sequence
  Description of Artificial Sequence: Synthetic polypeptide
DIVMTQSPSYLAASPGETITINCRASKSISKYLAWYQEKPGKTNKLLIYSGSTLQSGIPSRFSGSGSGTDFTLTISSLEPEDFAMYYCQQHNDYPLTFGAGTKLELK

SEQ ID NO: 81 - protein, 120 aa, Artificial Sequence
  Description of Artificial Sequence: Synthetic polypeptide
DVQLQESGPGLVAPSQSLSITCTVSGFSLSSYAISWVRQPPGKGLEWLGVIWAGGGTNYNSALKSRLSISKDNSKSQVFLKMKSLQTDDTARYYCARNFFYDYDDGMDYWGQGTTVTVSS

SEQ ID NO: 82 - protein, 112 aa, Artificial Sequence
  Description of Artificial Sequence: Synthetic polypeptide
NTQMNQTPLSLPVSLGDQASISCRSSQSLVHSNGNTYLHWYLQKPGQSPKLLIYKVSNRFSGVPDRFSGSGSGTDFTLKINRVEAEDLGVYFCSQSTHVPLTFGAGTRLEIK

SEQ ID NO: 83 - protein, 119 aa, Artificial Sequence
  Description of Artificial Sequence: Synthetic polypeptide
QIQLVQSGPELKKPGETVKISCKASGYTFTNYGMNWVKQAPGKGLKWMGWINTYTGEPTYADDFKGRFAFSLETSASTAYLQINNLKNEDMATYFCARPYFGDYAMDYWGQGTLVTVSA

SEQ ID NO: 84 - protein, 107 aa, Artificial Sequence
  Description of Artificial Sequence: Synthetic polypeptide
DVQMIQSPASLSVSVGETVTITCRASENIYSNLAWYQQKQGKSPQVLVYTATNLADGVPSRFSGSGSGTQYSLKINSLQSEDFGSYYCQHFWGNPWTFGGGTKLEIK

SEQ ID NO: 85 - protein, 120 aa, Artificial Sequence
  Description of Artificial Sequence: Synthetic polypeptide
QVQLQQSGPGLVAPSQSLSITCTVSGFSLTSYAISWIRQPPGKGLEWLGIIWAGGGTNYNSALKSRLSISKDNSKSQVFLKMNSLQIDDTARYYCARNPFYDYDEGLDYWGQGTTLTVSS

SEQ ID NO: 86 - protein, 112 aa, Artificial Sequence
  Description of Artificial Sequence: Synthetic polypeptide
DIVMTQSPLSLPVSLGDQASISCRSSQSLVHSNGNTYLHWYLQKPGQSPKLLIYKVSNRFSGVPDRFSGSGSGTDFTLKISRVEAEDLGVYFCSQSTHVPWTFGGGTKLEIK

SEQ ID NO: 87 - protein, 119 aa, Artificial Sequence
  Description of Artificial Sequence: Synthetic polypeptide
QVQLKESGPVLVAPSQSLSITCTVSGFSLTSYGVHWIRQPPGKGLEWLGVIWAGGNTNYNSTLMSRLSISKDNSKSQVFLKMNSLQTDDTAMYYCARGSFYDYLYFDYWGQGTTLTVSS

SEQ ID NO: 88 - protein, 107 aa, Artificial Sequence
  Description of Artificial Sequence: Synthetic polypeptide
DIQMTQSPSYLAASPGETITINCRASKSISKYLAWYQEKPGKTNELLIYSGSTLQSGIPSRFSGSGSGTDFTLTISSLEPEDFAMYYCQQHNEYPLTFGGGTKLEIK

SEQ ID NO: 89 - protein, 8 aa, Artificial Sequence
  Description of Artificial Sequence: Synthetic peptide
GFTFSSYA

SEQ ID NO: 90 - protein, 8 aa, Artificial Sequence
  Description of Artificial Sequence: Synthetic peptide
ISGSGGST

SEQ ID NO: 91 - protein, 16 aa, Artificial Sequence
  Description of Artificial Sequence: Synthetic peptide
AKDEGYSSGHYYGMDV

SEQ ID NO: 92 - protein, 7 aa, Artificial Sequence
  Description of Artificial Sequence: Synthetic peptide
QSISSSF

SEQ ID NO: 93 - protein, 3 aa, Artificial Sequence
  Description of Artificial Sequence: Synthetic peptide
GAS

SEQ ID NO: 94 - protein, 10 aa, Artificial Sequence
  Description of Artificial Sequence: Synthetic peptide
QHYGSSPMYT

SEQ ID NO: 95 - protein, 123 aa, Artificial Sequence
  Description of Artificial Sequence: Synthetic polypeptide
EVQLLESGGGLVQPGGSLRLSCAASGFTFSSYAMSWVRQAPGKGLEWVSAISGSGGSTYYADSVKGRFTISRDNSKNTLYLQMNSLRAEDTAVYYCAKDEGYSSGHYYGMDVWGQGTTVTVSS

SEQ ID NO: 96 - protein, 109 aa, Artificial Sequence
  Description of Artificial Sequence: Synthetic polypeptide
EIVLTQSPGTLSLSPGERATLSCRASQSISSSFLTWYQQKPGQAPRLLIYGASSRATGIPDRFSGGGSGTDFTLTISRLEPEDFAVYYCQHYGSSPMYTFGQGTKLEIK

SEQ ID NO: 97 - protein, 11 aa, Artificial Sequence
  Description of Artificial Sequence: Synthetic peptide
GYSITSGYFWN

SEQ ID NO: 98 - protein, 16 aa, Artificial Sequence
  Description of Artificial Sequence: Synthetic peptide
YISYDGSNNYNPSLKN

SEQ ID NO: 99 - protein, 11 aa, Artificial Sequence
  Description of Artificial Sequence: Synthetic peptide
PSPGTGYAVDY

SEQ ID NO: 100 - protein, 16 aa, Artificial Sequence
  Description of Artificial Sequence: Synthetic peptide
RSSQSLVHSNGNTYLH

SEQ ID NO: 101 - protein, 7 aa, Artificial Sequence
  Description of Artificial Sequence: Synthetic peptide
KVSNRFS

SEQ ID NO: 102 - protein, 9 aa, Artificial Sequence
  Description of Artificial Sequence: Synthetic peptide
SQSTHVPFT

SEQ ID NO: 103 - protein, 9 aa, Artificial Sequence
  Description of Artificial Sequence: Synthetic peptide
GYSITSGYF

SEQ ID NO: 104 - protein, 7 aa, Artificial Sequence
  Description of Artificial Sequence: Synthetic peptide
ISYDGSN

SEQ ID NO: 105 - protein, 13 aa, Artificial Sequence
  Description of Artificial Sequence: Synthetic peptide
ASPSPGTGYAVDY

SEQ ID NO: 106 - protein, 11 aa, Artificial Sequence
  Description of Artificial Sequence: Synthetic peptide
QSLVHSNGNTY

SEQ ID NO: 107 - protein, 3 aa, Artificial Sequence
  Description of Artificial Sequence: Synthetic peptide
KVS

SEQ ID NO: 108 - protein, 9 aa, Artificial Sequence
  Description of Artificial Sequence: Synthetic peptide
SQSTHVPFT

SEQ ID NO: 109 - protein, 5 aa, Artificial Sequence
  Description of Artificial Sequence: Synthetic peptide
GYFWN

SEQ ID NO: 110 - protein, 16 aa, Artificial Sequence
  Description of Artificial Sequence: Synthetic peptide
YISYDGSNNYNPSLKN

SEQ ID NO: 111 - protein, 11 aa, Artificial Sequence
  Description of Artificial Sequence: Synthetic peptide
PSPGTGYAVDY

SEQ ID NO: 112 - protein, 16 aa, Artificial Sequence
  Description of Artificial Sequence: Synthetic peptide
RSSQSLVHSNGNTYLH

SEQ ID NO: 113 - protein, 7 aa, Artificial Sequence
  Description of Artificial Sequence: Synthetic peptide
KVSNRFS

SEQ ID NO: 114 - protein, 9 aa, Artificial Sequence
  Description of Artificial Sequence: Synthetic peptide
SQSTHVPFT

SEQ ID NO: 115 - protein, 8 aa, Artificial Sequence
  Description of Artificial Sequence: Synthetic peptide
GYSITSGY

SEQ ID NO: 116 - protein, 3 aa, Artificial Sequence
  Description of Artificial Sequence: Synthetic peptide
YDG

SEQ ID NO: 117 - protein, 9 aa, Artificial Sequence
  Description of Artificial Sequence: Synthetic peptide
SPGTGYAVD

SEQ ID NO: 118 - protein, 12 aa, Artificial Sequence
  Description of Artificial Sequence: Synthetic peptide
SQSLVHSNGNTY

SEQ ID NO: 119 - protein, 3 aa, Artificial Sequence
  Description of Artificial Sequence: Synthetic peptide
KVS

SEQ ID NO: 120 - protein, 6 aa, Artificial Sequence
  Description of Artificial Sequence: Synthetic peptide
STHVPF

SEQ ID NO: 121-126 - skipped (6 entries)

SEQ ID NO: 127 - protein, 7 aa, Artificial Sequence
  Description of Artificial Sequence: Synthetic peptide
TSGYFWN

SEQ ID NO: 128 - protein, 12 aa, Artificial Sequence
  Description of Artificial Sequence: Synthetic peptide
WMGYISYDGSNN

SEQ ID NO: 129 - protein, 12 aa, Artificial Sequence
  Description of Artificial Sequence: Synthetic peptide
ASPSPGTGYAVD

SEQ ID NO: 130 - protein, 12 aa, Artificial Sequence
  Description of Artificial Sequence: Synthetic peptide
VHSNGNTYLHWY

SEQ ID NO: 131 - protein, 10 aa, Artificial Sequence
  Description of Artificial Sequence: Synthetic peptide
FLIYKVSNRF

SEQ ID NO: 132 - protein, 8 aa, Artificial Sequence
  Description of Artificial Sequence: Synthetic peptide
SQSTHVPF

SEQ ID NO: 133 - protein, 11 aa, Artificial Sequence
  Description of Artificial Sequence: Synthetic peptide
GYSITSGYFWN

SEQ ID NO: 134 - protein, 9 aa, Artificial Sequence
  Description of Artificial Sequence: Synthetic peptide
YISYDGSNN

SEQ ID NO: 135 - protein, 11 aa, Artificial Sequence
  Description of Artificial Sequence: Synthetic peptide
PSPGTGYAVDY

SEQ ID NO: 136 - protein, 16 aa, Artificial Sequence
  Description of Artificial Sequence: Synthetic peptide
RSSQSLVHSNGNTYLH

SEQ ID NO: 137 - protein, 7 aa, Artificial Sequence
  Description of Artificial Sequence: Synthetic peptide
KVSNRFS

SEQ ID NO: 138 - protein, 9 aa, Artificial Sequence
  Description of Artificial Sequence: Synthetic peptide
SQSTHVPFT

SEQ ID NO: 139 - protein, 11 aa, Artificial Sequence
  Description of Artificial Sequence: Synthetic peptide
GYSITSGYFWN

SEQ ID NO: 140 - protein, 16 aa, Artificial Sequence
  Description of Artificial Sequence: Synthetic peptide
YISYDGSNNYADSVKG

SEQ ID NO: 141 - protein, 11 aa, Artificial Sequence
  Description of Artificial Sequence: Synthetic peptide
PSPGTGYAVDY

SEQ ID NO: 142 - protein, 16 aa, Artificial Sequence
  Description of Artificial Sequence: Synthetic peptide
RSSQSLVHSNGNTYLH

SEQ ID NO: 143 - protein, 7 aa, Artificial Sequence
  Description of Artificial Sequence: Synthetic peptide
KVSNRFS

SEQ ID NO: 144 - protein, 9 aa, Artificial Sequence
  Description of Artificial Sequence: Synthetic peptide
SQSTHVPFT

SEQ ID NO: 145 - protein, 9 aa, Artificial Sequence
  Description of Artificial Sequence: Synthetic peptide
GYSITSGYF

SEQ ID NO: 146 - protein, 7 aa, Artificial Sequence
  Description of Artificial Sequence: Synthetic peptide
ISYDGSN

SEQ ID NO: 147 - protein, 13 aa, Artificial Sequence
  Description of Artificial Sequence: Synthetic peptide
AKPSPGTGYAVDY

SEQ ID NO: 148 - protein, 11 aa, Artificial Sequence
  Description of Artificial Sequence: Synthetic peptide
QSLVHSNGNTY

SEQ ID NO: 149 - protein, 3 aa, Artificial Sequence
  Description of Artificial Sequence: Synthetic peptide
KVS

SEQ ID NO: 150 - protein, 9 aa, Artificial Sequence
  Description of Artificial Sequence: Synthetic peptide
SQSTHVPFT

SEQ ID NO: 151 - protein, 5 aa, Artificial Sequence
  Description of Artificial Sequence: Synthetic peptide
GYFWN

SEQ ID NO: 152 - protein, 16 aa, Artificial Sequence
  Description of Artificial Sequence: Synthetic peptide
YISYDGSNNYADSVKG

SEQ ID NO: 153 - protein, 11 aa, Artificial Sequence
  Description of Artificial Sequence: Synthetic peptide
PSPGTGYAVDY

SEQ ID NO: 154 - protein, 16 aa, Artificial Sequence
  Description of Artificial Sequence: Synthetic peptide
RSSQSLVHSNGNTYLH

SEQ ID NO: 155 - protein, 7 aa, Artificial Sequence
  Description of Artificial Sequence: Synthetic peptide
KVSNRFS

SEQ ID NO: 156 - protein, 9 aa, Artificial Sequence
  Description of Artificial Sequence: Synthetic peptide
SQSTHVPFT

SEQ ID NO: 157 - protein, 8 aa, Artificial Sequence
  Description of Artificial Sequence: Synthetic peptide
GYSITSGY

SEQ ID NO: 158 - protein, 3 aa, Artificial Sequence
  Description of Artificial Sequence: Synthetic peptide
YDG

SEQ ID NO: 159 - protein, 9 aa, Artificial Sequence
  Description of Artificial Sequence: Synthetic peptide
SPGTGYAVD

SEQ ID NO: 160 - protein, 12 aa, Artificial Sequence
  Description of Artificial Sequence: Synthetic peptide
SQSLVHSNGNTY

SEQ ID NO: 161 - protein, 3 aa, Artificial Sequence
  Description of Artificial Sequence: Synthetic peptide
KVS

SEQ ID NO: 162 - protein, 6 aa, Artificial Sequence
  Description of Artificial Sequence: Synthetic peptide
STHVPF

SEQ ID NO: 163-168 - skipped (6 entries)

SEQ ID NO: 169 - protein, 7 aa, Artificial Sequence
  Description of Artificial Sequence: Synthetic peptide
TSGYFWN

SEQ ID NO: 170 - protein, 12 aa, Artificial Sequence
  Description of Artificial Sequence: Synthetic peptide
WVSYISYDGSNN

SEQ ID NO: 171 - protein, 12 aa, Artificial Sequence
  Description of Artificial Sequence: Synthetic peptide
AKPSPGTGYAVD

SEQ ID NO: 172 - protein, 12 aa, Artificial Sequence
  Description of Artificial Sequence: Synthetic peptide
VHSNGNTYLHWY

SEQ ID NO: 173 - protein, 10 aa, Artificial Sequence
  Description of Artificial Sequence: Synthetic peptide
LLIYKVSNRF

SEQ ID NO: 174 - protein, 8 aa, Artificial Sequence
  Description of Artificial Sequence: Synthetic peptide
SQSTHVPF

SEQ ID NO: 175 - protein, 11 aa, Artificial Sequence
  Description of Artificial Sequence: Synthetic peptide
GYSITSGYFWN

SEQ ID NO: 176 - protein, 9 aa, Artificial Sequence
  Description of Artificial Sequence: Synthetic peptide
YISYDGSNN

SEQ ID NO: 177 - protein, 11 aa, Artificial Sequence
  Description of Artificial Sequence: Synthetic peptide
PSPGTGYAVDY

SEQ ID NO: 178 - protein, 16 aa, Artificial Sequence
  Description of Artificial Sequence: Synthetic peptide
RSSQSLVHSNGNTYLH

SEQ ID NO: 179 - protein, 7 aa, Artificial Sequence
  Description of Artificial Sequence: Synthetic peptide
KVSNRFS

SEQ ID NO: 180 - protein, 9 aa, Artificial Sequence
  Description of Artificial Sequence: Synthetic peptide
SQSTHVPFT

SEQ ID NO: 181 - protein, 11 aa, Artificial Sequence
  Description of Artificial Sequence: Synthetic peptide
GYSITSGYFWN

SEQ ID NO: 182 - protein, 16 aa, Artificial Sequence
  Description of Artificial Sequence: Synthetic peptide
YISYDGSNNYADSVKG

SEQ ID NO: 183 - protein, 11 aa, Artificial Sequence
  Description of Artificial Sequence: Synthetic peptide
PSPGTGYAVDY

SEQ ID NO: 184 - protein, 16 aa, Artificial Sequence
  Description of Artificial Sequence: Synthetic peptide
RSSQSLVHSNGNTYLH

SEQ ID NO: 185 - protein, 7 aa, Artificial Sequence
  Description of Artificial Sequence: Synthetic peptide
KVSNRFS

SEQ ID NO: 186 - protein, 9 aa, Artificial Sequence
  Description of Artificial Sequence: Synthetic peptide
SQSTHVPFT

SEQ ID NO: 187 - protein, 9 aa, Artificial Sequence
  Description of Artificial Sequence: Synthetic peptide
GYSITSGYF

SEQ ID NO: 188 - protein, 7 aa, Artificial Sequence
  Description of Artificial Sequence: Synthetic peptide
ISYDGSN

SEQ ID NO: 189 - protein, 13 aa, Artificial Sequence
  Description of Artificial Sequence: Synthetic peptide
ASPSPGTGYAVDY

SEQ ID NO: 190 - protein, 11 aa, Artificial Sequence
  Description of Artificial Sequence: Synthetic peptide
QSLVHSNGNTY

SEQ ID NO: 191 - protein, 3 aa, Artificial Sequence
  Description of Artificial Sequence: Synthetic peptide
KVS

SEQ ID NO: 192 - protein, 9 aa, Artificial Sequence
  Description of Artificial Sequence: Synthetic peptide
SQSTHVPFT

SEQ ID NO: 193 - protein, 5 aa, Artificial Sequence
  Description of Artificial Sequence: Synthetic peptide
GYFWN

SEQ ID NO: 194 - protein, 16 aa, Artificial Sequence
  Description of Artificial Sequence: Synthetic peptide
YISYDGSNNYADSVKG

SEQ ID NO: 195 - protein, 11 aa, Artificial Sequence
  Description of Artificial Sequence: Synthetic peptide
PSPGTGYAVDY

SEQ ID NO: 196 - protein, 16 aa, Artificial Sequence
  Description of Artificial Sequence: Synthetic peptide
RSSQSLVHSNGNTYLH

SEQ ID NO: 197 - protein, 7 aa, Artificial Sequence
  Description of Artificial Sequence: Synthetic peptide
KVSNRFS

SEQ ID NO: 198 - protein, 9 aa, Artificial Sequence
  Description of Artificial Sequence: Synthetic peptide
SQSTHVPFT

SEQ ID NO: 199 - protein, 8 aa, Artificial Sequence
  Description of Artificial Sequence: Synthetic peptide
GYSITSGY

SEQ ID NO: 200 - protein, 3 aa, Artificial Sequence
  Description of Artificial Sequence: Synthetic peptide
YDG

SEQ ID NO: 201 - protein, 9 aa, Artificial Sequence
  Description of Artificial Sequence: Synthetic peptide
SPGTGYAVD

SEQ ID NO: 202 - protein, 12 aa, Artificial Sequence
  Description of Artificial Sequence: Synthetic peptide
SQSLVHSNGNTY

SEQ ID NO: 203 - protein, 3 aa, Artificial Sequence
  Description of Artificial Sequence: Synthetic peptide
KVS

SEQ ID NO: 204 - protein, 6 aa, Artificial Sequence
  Description of Artificial Sequence: Synthetic peptide
STHVPF

SEQ ID NO: 205-210 - skipped (6 entries)

SEQ ID NO: 211 - protein, 7 aa, Artificial Sequence
  Description of Artificial Sequence: Synthetic peptide
TSGYFWN

SEQ ID NO: 212 - protein, 12 aa, Artificial Sequence
  Description of Artificial Sequence: Synthetic peptide
WVSYISYDGSNN

SEQ ID NO: 213 - protein, 12 aa, Artificial Sequence
  Description of Artificial Sequence: Synthetic peptide
ASPSPGTGYAVD

SEQ ID NO: 214 - protein, 12 aa, Artificial Sequence
  Description of Artificial Sequence: Synthetic peptide
VHSNGNTYLHWY

SEQ ID NO: 215 - protein, 10 aa, Artificial Sequence
  Description of Artificial Sequence: Synthetic peptide
FLIYKVSNRF

SEQ ID NO: 216 - protein, 8 aa, Artificial Sequence
  Description of Artificial Sequence: Synthetic peptide
SQSTHVPF

SEQ ID NO: 217 - protein, 11 aa, Artificial Sequence
  Description of Artificial Sequence: Synthetic peptide
GYSITSGYFWN

SEQ ID NO: 218 - protein, 9 aa, Artificial Sequence
  Description of Artificial Sequence: Synthetic peptide
YISYDGSNN

SEQ ID NO: 219 - protein, 11 aa, Artificial Sequence
  Description of Artificial Sequence: Synthetic peptide
PSPGTGYAVDY

SEQ ID NO: 220 - protein, 16 aa, Artificial Sequence
  Description of Artificial Sequence: Synthetic peptide
RSSQSLVHSNGNTYLH

SEQ ID NO: 221 - protein, 7 aa, Artificial Sequence
  Description of Artificial Sequence: Synthetic peptide
KVSNRFS

SEQ ID NO: 222 - protein, 9 aa, Artificial Sequence
  Description of Artificial Sequence: Synthetic peptide
SQSTHVPFT

SEQ ID NO: 223 - protein, 11 aa, Artificial Sequence
  Description of Artificial Sequence: Synthetic peptide
GYSITSGYFWN

SEQ ID NO: 224 - protein, 16 aa, Artificial Sequence
  Description of Artificial Sequence: Synthetic peptide
YISYDGSNNYNPSLKS

SEQ ID NO: 225 - protein, 11 aa, Artificial Sequence
  Description of Artificial Sequence: Synthetic peptide
PSPGTGYAVDY

SEQ ID NO: 226 - protein, 16 aa, Artificial Sequence
  Description of Artificial Sequence: Synthetic peptide
RSSQSLVHSNGNTYLH

SEQ ID NO: 227 - protein, 7 aa, Artificial Sequence
  Description of Artificial Sequence: Synthetic peptide
KVSNRFS

SEQ ID NO: 228 - protein, 9 aa, Artificial Sequence
  Description of Artificial Sequence: Synthetic peptide
SQSTHVPFT

SEQ ID NO: 229 - protein, 9 aa, Artificial Sequence
  Description of Artificial Sequence: Synthetic peptide
GYSITSGYF

SEQ ID NO: 230 - protein, 7 aa, Artificial Sequence
  Description of Artificial Sequence: Synthetic peptide
ISYDGSN

SEQ ID NO: 231 - protein, 13 aa, Artificial Sequence
  Description of Artificial Sequence: Synthetic peptide
ASPSPGTGYAVDY

SEQ ID NO: 232 - protein, 11 aa, Artificial Sequence
  Description of Artificial Sequence: Synthetic peptide
QSLVHSNGNTY

SEQ ID NO: 233 - protein, 3 aa, Artificial Sequence
  Description of Artificial Sequence: Synthetic peptide
KVS

SEQ ID NO: 234 - protein, 9 aa, Artificial Sequence
  Description of Artificial Sequence: Synthetic peptide
SQSTHVPFT

SEQ ID NO: 235 - protein, 5 aa, Artificial Sequence
  Description of Artificial Sequence: Synthetic peptide
GYFWN

SEQ ID NO: 236 - protein, 16 aa, Artificial Sequence
  Description of Artificial Sequence: Synthetic peptide
YISYDGSNNYNPSLKS

SEQ ID NO: 237 - protein, 11 aa, Artificial Sequence
  Description of Artificial Sequence: Synthetic peptide
PSPGTGYAVDY

SEQ ID NO: 238 - protein, 16 aa, Artificial Sequence
  Description of Artificial Sequence: Synthetic peptide
RSSQSLVHSNGNTYLH

SEQ ID NO: 239 - protein, 7 aa, Artificial Sequence
  Description of Artificial Sequence: Synthetic peptide
KVSNRFS

SEQ ID NO: 240 - protein, 9 aa, Artificial Sequence
  Description of Artificial Sequence: Synthetic peptide
SQSTHVPFT

SEQ ID NO: 241 - protein, 8 aa, Artificial Sequence
  Description of Artificial Sequence: Synthetic peptide
GYSITSGY

SEQ ID NO: 242 - protein, 3 aa, Artificial Sequence
  Description of Artificial Sequence: Synthetic peptide
YDG

SEQ ID NO: 243 - protein, 9 aa, Artificial Sequence
  Description of Artificial Sequence: Synthetic peptide
SPGTGYAVD

SEQ ID NO: 244 - protein, 12 aa, Artificial Sequence
  Description of Artificial Sequence: Synthetic peptide
SQSLVHSNGNTY

SEQ ID NO: 245 - protein, 3 aa, Artificial Sequence
  Description of Artificial Sequence: Synthetic peptide
KVS

SEQ ID NO: 246 - protein, 6 aa, Artificial Sequence
  Description of Artificial Sequence: Synthetic peptide
STHVPF

SEQ ID NO: 247-252 - skipped (6 entries)

SEQ ID NO: 253 - protein, 7 aa, Artificial Sequence
  Description of Artificial Sequence: Synthetic peptide
TSGYFWN

SEQ ID NO: 254 - protein, 12 aa, Artificial Sequence
  Description of Artificial Sequence: Synthetic peptide
WIGYISYDGSNN

SEQ ID NO: 255 - protein, 12 aa, Artificial Sequence
  Description of Artificial Sequence: Synthetic peptide
ASPSPGTGYAVD

SEQ ID NO: 256 - protein, 12 aa, Artificial Sequence
  Description of Artificial Sequence: Synthetic peptide
VHSNGNTYLHWF

SEQ ID NO: 257 - protein, 10 aa, Artificial Sequence
  Description of Artificial Sequence: Synthetic peptide
FLIYKVSNRF

SEQ ID NO: 258 - protein, 8 aa, Artificial Sequence
  Description of Artificial Sequence: Synthetic peptide
SQSTHVPF

SEQ ID NO: 259 - protein, 11 aa, Artificial Sequence
  Description of Artificial Sequence: Synthetic peptide
GYSITSGYFWN

SEQ ID NO: 260 - protein, 9 aa, Artificial Sequence
  Description of Artificial Sequence: Synthetic peptide
YISYDGSNN

SEQ ID NO: 261 - protein, 11 aa, Artificial Sequence
  Description of Artificial Sequence: Synthetic peptide
PSPGTGYAVDY

SEQ ID NO: 262 - protein, 16 aa, Artificial Sequence
  Description of Artificial Sequence: Synthetic peptide
RSSQSLVHSNGNTYLH

SEQ ID NO: 263 - protein, 7 aa, Artificial Sequence
  Description of Artificial Sequence: Synthetic peptide
KVSNRFS

SEQ ID NO: 264 - protein, 9 aa, Artificial Sequence
  Description of Artificial Sequence: Synthetic peptide
SQSTHVPFT

SEQ ID NO: 265 - protein, 11 aa, Artificial Sequence
  Description of Artificial Sequence: Synthetic peptide
GYSITSGYYWN

SEQ ID NO: 266 - protein, 16 aa, Artificial Sequence
  Description of Artificial Sequence: Synthetic peptide
YISYDGSNNYNPSLKN

SEQ ID NO: 267 - protein, 11 aa, Artificial Sequence
  Description of Artificial Sequence: Synthetic peptide
PSPGTGYAVDY

SEQ ID NO: 268 - protein, 16 aa, Artificial Sequence
  Description of Artificial Sequence: Synthetic peptide
RSSQSLVHSNGNTYLH

SEQ ID NO: 269 - protein, 7 aa, Artificial Sequence
  Description of Artificial Sequence: Synthetic peptide
KVSNRFS

SEQ ID NO: 270 - protein, 9 aa, Artificial Sequence
  Description of Artificial Sequence: Synthetic peptide
SQSTHVPFT

SEQ ID NO: 271 - protein, 9 aa, Artificial Sequence
  Description of Artificial Sequence: Synthetic peptide
GYSITSGYY

SEQ ID NO: 272 - protein, 7 aa, Artificial Sequence
  Description of Artificial Sequence: Synthetic peptide
ISYDGSN

SEQ ID NO: 273 - protein, 13 aa, Artificial Sequence
  Description of Artificial Sequence: Synthetic peptide
TRPSPGTGYAVDY

SEQ ID NO: 274 - protein, 11 aa, Artificial Sequence
  Description of Artificial Sequence: Synthetic peptide
QSLVHSNGNTY

SEQ ID NO: 275 - protein, 3 aa, Artificial Sequence
  Description of Artificial Sequence: Synthetic peptide
KVS

SEQ ID NO: 276 - protein, 9 aa, Artificial Sequence
  Description of Artificial Sequence: Synthetic peptide
SQSTHVPFT

SEQ ID NO: 277 - protein, 5 aa, Artificial Sequence
  Description of Artificial Sequence: Synthetic peptide
GYYWN

SEQ ID NO: 278 - protein, 16 aa, Artificial Sequence
  Description of Artificial Sequence: Synthetic peptide
YISYDGSNNYNPSLKN

SEQ ID NO: 279 - protein, 11 aa, Artificial Sequence
  Description of Artificial Sequence: Synthetic peptide
PSPGTGYAVDY

SEQ ID NO: 280 - protein, 16 aa, Artificial Sequence
  Description of Artificial Sequence: Synthetic peptide
RSSQSLVHSNGNTYLH

SEQ ID NO: 281 - protein, 7 aa, Artificial Sequence
  Description of Artificial Sequence: Synthetic peptide
KVSNRFS

SEQ ID NO: 282 - protein, 9 aa, Artificial Sequence
  Description of Artificial Sequence: Synthetic peptide
SQSTHVPFT

SEQ ID NO: 283 - protein, 8 aa, Artificial Sequence
  Description of Artificial Sequence: Synthetic peptide
GYSITSGY

SEQ ID NO: 284 - protein, 3 aa, Artificial Sequence
  Description of Artificial Sequence: Synthetic peptide
YDG

SEQ ID NO: 285 - protein, 9 aa, Artificial Sequence
  Description of Artificial Sequence: Synthetic peptide
SPGTGYAVD

SEQ ID NO: 286 - protein, 12 aa, Artificial Sequence
  Description of Artificial Sequence: Synthetic peptide
SQSLVHSNGNTY

SEQ ID NO: 287 - protein, 3 aa, Artificial Sequence
  Description of Artificial Sequence: Synthetic peptide
KVS

SEQ ID NO: 288 - protein, 6 aa, Artificial Sequence
  Description of Artificial Sequence: Synthetic peptide
STHVPF

SEQ ID NO: 289-294 - skipped (6 entries)

SEQ ID NO: 295 - protein, 7 aa, Artificial Sequence
  Description of Artificial Sequence: Synthetic peptide
TSGYYWN

SEQ ID NO: 296 - protein, 12 aa, Artificial Sequence
  Description of Artificial Sequence: Synthetic peptide
WMGYISYDGSNN

SEQ ID NO: 297 - protein, 12 aa, Artificial Sequence
  Description of Artificial Sequence: Synthetic peptide
TRPSPGTGYAVD

SEQ ID NO: 298 - protein, 12 aa, Artificial Sequence
  Description of Artificial Sequence: Synthetic peptide
VHSNGNTYLHWY

SEQ ID NO: 299 - protein, 10 aa, Artificial Sequence
  Description of Artificial Sequence: Synthetic peptide
LLIYKVSNRF

SEQ ID NO: 300 - protein, 8 aa, Artificial Sequence
  Description of Artificial Sequence: Synthetic peptide
SQSTHVPF

SEQ ID NO: 301 - protein, 11 aa, Artificial Sequence
  Description of Artificial Sequence: Synthetic peptide
GYSITSGYYWN

SEQ ID NO: 302 - protein, 9 aa, Artificial Sequence
  Description of Artificial Sequence: Synthetic peptide
YISYDGSNN

SEQ ID NO: 303 - protein, 11 aa, Artificial Sequence
  Description of Artificial Sequence: Synthetic peptide
PSPGTGYAVDY

SEQ ID NO: 304 - protein, 16 aa, Artificial Sequence
  Description of Artificial Sequence: Synthetic peptide
RSSQSLVHSNGNTYLH

SEQ ID NO: 305 - protein, 7 aa, Artificial Sequence
  Description of Artificial Sequence: Synthetic peptide
KVSNRFS

SEQ ID NO: 306 - protein, 9 aa, Artificial Sequence
  Description of Artificial Sequence: Synthetic peptide
SQSTHVPFT

SEQ ID NO: 307 - protein, 10 aa, Artificial Sequence
  Description of Artificial Sequence: Synthetic peptide
GFSLTSYGVH

SEQ ID NO: 308 - protein, 16 aa, Artificial Sequence
  Description of Artificial Sequence: Synthetic peptide
IIWAGGGTNYNSALMS

SEQ ID NO: 309 - protein, 11 aa, Artificial Sequence
  Description of Artificial Sequence: Synthetic peptide
GTFFNYDYFDY

SEQ ID NO: 310 - protein, 11 aa, Artificial Sequence
  Description of Artificial Sequence: Synthetic peptide
KASQDVGTDVA

SEQ ID NO: 311 - protein, 7 aa, Artificial Sequence
  Description of Artificial Sequence: Synthetic peptide
WASTRHT

SEQ ID NO: 312 - protein, 9 aa, Artificial Sequence
  Description of Artificial Sequence: Synthetic peptide
QQYSRYPWT

SEQ ID NO: 313 - protein, 8 aa, Artificial Sequence
  Description of Artificial Sequence: Synthetic peptide
GFSLTSYG

SEQ ID NO: 314 - protein, 7 aa, Artificial Sequence
  Description of Artificial Sequence: Synthetic peptide
IWAGGGT

SEQ ID NO: 315 - protein, 13 aa, Artificial Sequence
  Description of Artificial Sequence: Synthetic peptide
ARGTFFNYDYFDY

SEQ ID NO: 316 - protein, 6 aa, Artificial Sequence
  Description of Artificial Sequence: Synthetic peptide
QDVGTD

SEQ ID NO: 317 - protein, 3 aa, Artificial Sequence
  Description of Artificial Sequence: Synthetic peptide
WAS

SEQ ID NO: 318 - protein, 9 aa, Artificial Sequence
  Description of Artificial Sequence: Synthetic peptide
QQYSRYPWT

SEQ ID NO: 319 - protein, 5 aa, Artificial Sequence
  Description of Artificial Sequence: Synthetic peptide
SYGVH

SEQ ID NO: 320 - protein, 16 aa, Artificial Sequence
  Description of Artificial Sequence: Synthetic peptide
IIWAGGGTNYNSALMS

SEQ ID NO: 321 - protein, 11 aa, Artificial Sequence
  Description of Artificial Sequence: Synthetic peptide
GTFFNYDYFDY

SEQ ID NO: 322 - protein, 11 aa, Artificial Sequence
  Description of Artificial Sequence: Synthetic peptide
KASQDVGTDVA

SEQ ID NO: 323 - protein, 7 aa, Artificial Sequence
  Description of Artificial Sequence: Synthetic peptide
WASTRHT

SEQ ID NO: 324 - protein, 9 aa, Artificial Sequence
  Description of Artificial Sequence: Synthetic peptide
QQYSRYPWT

SEQ ID NO: 325 - protein, 7 aa, Artificial Sequence
  Description of Artificial Sequence: Synthetic peptide
GFSLTSY

SEQ ID NO: 326 - protein, 3 aa, Artificial Sequence
  Description of Artificial Sequence: Synthetic peptide
AGG

SEQ ID NO: 327 - protein, 9 aa, Artificial Sequence
  Description of Artificial Sequence: Synthetic peptide
TFFNYDYFD

SEQ ID NO: 328 - protein, 7 aa, Artificial Sequence
  Description of Artificial Sequence: Synthetic peptide
SQDVGTD

SEQ ID NO: 329 - protein, 3 aa, Artificial Sequence
  Description of Artificial Sequence: Synthetic peptide
WAS

SEQ ID NO: 330 - protein, 6 aa, Artificial Sequence
  Description of Artificial Sequence: Synthetic peptide
YSRYPW

SEQ ID NO: 331 - protein, 7 aa, Artificial Sequence
  Description of Artificial Sequence: Synthetic peptide
GFSLTSY

SEQ ID NO: 332 - protein, 5 aa, Artificial Sequence
  Description of Artificial Sequence: Synthetic peptide
WAGGG

SEQ ID NO: 333 - protein, 10 aa, Artificial Sequence
  Description of Artificial Sequence: Synthetic peptide
GTFFNYDYFD

SEQ ID NO: 334 - protein, 7 aa, Artificial Sequence
  Description of Artificial Sequence: Synthetic peptide
SQDVGTD

SEQ ID NO: 335 - protein, 3 aa, Artificial Sequence
  Description of Artificial Sequence: Synthetic peptide
WAS

SEQ ID NO: 336 - protein, 6 aa, Artificial Sequence
  Description of Artificial Sequence: Synthetic peptide
YSRYPW

SEQ ID NO: 337 - protein, 6 aa, Artificial Sequence
  Description of Artificial Sequence: Synthetic peptide
TSYGVH

SEQ ID NO: 338 - protein, 12 aa, Artificial Sequence
  Description of Artificial Sequence: Synthetic peptide
WLGIIWAGGGTN

SEQ ID NO: 339 - protein, 12 aa, Artificial Sequence
  Description of Artificial Sequence: Synthetic peptide
ARGTFFNYDYFD

SEQ ID NO: 340 - protein, 7 aa, Artificial Sequence
  Description of Artificial Sequence: Synthetic peptide
GTDVAWY

SEQ ID NO: 341 - protein, 10 aa, Artificial Sequence
  Description of Artificial Sequence: Synthetic peptide
LMIYWASTRH

SEQ ID NO: 342 - protein, 8 aa, Artificial Sequence
  Description of Artificial Sequence: Synthetic peptide
QQYSRYPW

SEQ ID NO: 343 - protein, 10 aa, Artificial Sequence
  Description of Artificial Sequence: Synthetic peptide
GFSLTSYGVH

SEQ ID NO: 344 - protein, 9 aa, Artificial Sequence
  Description of Artificial Sequence: Synthetic peptide
IIWAGGGTN

SEQ ID NO: 345 - protein, 11 aa, Artificial Sequence
  Description of Artificial Sequence: Synthetic peptide
GTFFNYDYFDY

SEQ ID NO: 346 - protein, 11 aa, Artificial Sequence
  Description of Artificial Sequence: Synthetic peptide
KASQDVGTDVA

SEQ ID NO: 347 - protein, 7 aa, Artificial Sequence
  Description of Artificial Sequence: Synthetic peptide
WASTRHT

SEQ ID NO: 348 - protein, 9 aa, Artificial Sequence
  Description of Artificial Sequence: Synthetic peptide
QQYSRYPWT

SEQ ID NO: 349 - protein, 10 aa, Artificial Sequence
  Description of Artificial Sequence: Synthetic peptide
GFSLTSYGVH

SEQ ID NO: 350 - protein, 16 aa, Artificial Sequence
  Description of Artificial Sequence: Synthetic peptide
IIWAGGNTNSNSALMS

SEQ ID NO: 351 - protein, 11 aa, Artificial Sequence
  Description of Artificial Sequence: Synthetic peptide
GSFYSYLYFDY

SEQ ID NO: 352 - protein, 11 aa, Artificial Sequence
  Description of Artificial Sequence: Synthetic peptide
RASKSISKYLA

SEQ ID NO: 353 - protein, 7 aa, Artificial Sequence
  Description of Artificial Sequence: Synthetic peptide
SGSTLQS

SEQ ID NO: 354 - protein, 9 aa, Artificial Sequence
  Description of Artificial Sequence: Synthetic peptide
QQHNDYPLT

SEQ ID NO: 355 - protein, 8 aa, Artificial Sequence
  Description of Artificial Sequence: Synthetic peptide
GFSLTSYG

SEQ ID NO: 356 - protein, 7 aa, Artificial Sequence
  Description of Artificial Sequence: Synthetic peptide
IWAGGNT

SEQ ID NO: 357 - protein, 13 aa, Artificial Sequence
  Description of Artificial Sequence: Synthetic peptide
ARGSFYSYLYFDY

SEQ ID NO: 358 - protein, 6 aa, Artificial Sequence
  Description of Artificial Sequence: Synthetic peptide
KSISKY

SEQ ID NO: 359 - protein, 3 aa, Artificial Sequence
  Description of Artificial Sequence: Synthetic peptide
SGS

SEQ ID NO: 360 - protein, 9 aa, Artificial Sequence
  Description of Artificial Sequence: Synthetic peptide
QQHNDYPLT

SEQ ID NO: 361 - protein, 5 aa, Artificial Sequence
  Description of Artificial Sequence: Synthetic peptide
SYGVH

SEQ ID NO: 362 - protein, 16 aa, Artificial Sequence
  Description of Artificial Sequence: Synthetic peptide
IIWAGGNTNSNSALMS

SEQ ID NO: 363 - protein, 11 aa, Artificial Sequence
  Description of Artificial Sequence: Synthetic peptide
GSFYSYLYFDY

SEQ ID NO: 364 - protein, 11 aa, Artificial Sequence
  Description of Artificial Sequence: Synthetic peptide
RASKSISKYLA

SEQ ID NO: 365 - protein, 7 aa, Artificial Sequence
  Description of Artificial Sequence: Synthetic peptide
SGSTLQS

SEQ ID NO: 366 - protein, 9 aa, Artificial Sequence
  Description of Artificial Sequence: Synthetic peptide
QQHNDYPLT

SEQ ID NO: 367 - protein, 7 aa, Artificial Sequence
  Description of Artificial Sequence: Synthetic peptide
GFSLTSY

SEQ ID NO: 368 - protein, 3 aa, Artificial Sequence
  Description of Artificial Sequence: Synthetic peptide
AGG

SEQ ID NO: 369 - protein, 9 aa, Artificial Sequence
  Description of Artificial Sequence: Synthetic peptide
SFYSYLYFD

SEQ ID NO: 370 - protein, 7 aa, Artificial Sequence
  Description of Artificial Sequence: Synthetic peptide
SKSISKY

SEQ ID NO: 371 - protein, 3 aa, Artificial Sequence
  Description of Artificial Sequence: Synthetic peptide
SGS

SEQ ID NO: 372 - protein, 6 aa, Artificial Sequence
  Description of Artificial Sequence: Synthetic peptide
HNDYPL

SEQ ID NO: 373 - protein, 7 aa, Artificial Sequence
  Description of Artificial Sequence: Synthetic peptide
GFSLTSY

SEQ ID NO: 374 - protein, 5 aa, Artificial Sequence
  Description of Artificial Sequence: Synthetic peptide
WAGGN

SEQ ID NO: 375 - protein, 10 aa, Artificial Sequence
  Description of Artificial Sequence: Synthetic peptide
GSFYSYLYFD

SEQ ID NO: 376 - protein, 7 aa, Artificial Sequence
  Description of Artificial Sequence: Synthetic peptide
SKSISKY

SEQ ID NO: 377 - protein, 3 aa, Artificial Sequence
  Description of Artificial Sequence: Synthetic peptide
SGS

SEQ ID NO: 378 - protein, 6 aa, Artificial Sequence
  Description of Artificial Sequence: Synthetic peptide
HNDYPL

SEQ ID NO: 379 - protein, 6 aa, Artificial Sequence
  Description of Artificial Sequence: Synthetic peptide
TSYGVH

SEQ ID NO: 380 - protein, 12 aa, Artificial Sequence
  Description of Artificial Sequence: Synthetic peptide
WLGIIWAGGNTN

SEQ ID NO: 381 - protein, 12 aa, Artificial Sequence
  Description of Artificial Sequence: Synthetic peptide
ARGSFYSYLYFD

SEQ ID NO: 382 - protein, 7 aa, Artificial Sequence
  Description of Artificial Sequence: Synthetic peptide
SKYLAWY

SEQ ID NO: 383 - protein, 10 aa, Artificial Sequence
  Description of Artificial Sequence: Synthetic peptide
LLIYSGSTLQ

SEQ ID NO: 384 - protein, 8 aa, Artificial Sequence
  Description of Artificial Sequence: Synthetic peptide
QQHNDYPL

SEQ ID NO: 385 - protein, 10 aa, Artificial Sequence
  Description of Artificial Sequence: Synthetic peptide
GFSLTSYGVH

SEQ ID NO: 386 - protein, 9 aa, Artificial Sequence
  Description of Artificial Sequence: Synthetic peptide
IIWAGGNTN

SEQ ID NO: 387 - protein, 11 aa, Artificial Sequence
  Description of Artificial Sequence: Synthetic peptide
GSFYSYLYFDY

SEQ ID NO: 388 - protein, 11 aa, Artificial Sequence
  Description of Artificial Sequence: Synthetic peptide
RASKSISKYLA

SEQ ID NO: 389 - protein, 7 aa, Artificial Sequence
  Description of Artificial Sequence: Synthetic peptide
SGSTLQS

SEQ ID NO: 390 - protein, 9 aa, Artificial Sequence
  Description of Artificial Sequence: Synthetic peptide
QQHNDYPLT

SEQ ID NO: 391 - protein, 10 aa, Artificial Sequence
  Description of Artificial Sequence: Synthetic peptide
GFSLSSYAIS

SEQ ID NO: 392 - protein, 16 aa, Artificial Sequence
  Description of Artificial Sequence: Synthetic peptide
VIWAGGGTNYNSALKS

SEQ ID NO: 393 - protein, 12 aa, Artificial Sequence
  Description of Artificial Sequence: Synthetic peptide
NFFYDYDDGMDY

SEQ ID NO: 394 - protein, 16 aa, Artificial Sequence
  Description of Artificial Sequence: Synthetic peptide
RSSQSLVHSNGNTYLH

SEQ ID NO: 395 - protein, 7 aa, Artificial Sequence
  Description of Artificial Sequence: Synthetic peptide
KVSNRFS

SEQ ID NO: 396 - protein, 9 aa, Artificial Sequence
  Description of Artificial Sequence: Synthetic peptide
SQSTHVPLT

SEQ ID NO: 397 - protein, 8 aa, Artificial Sequence
  Description of Artificial Sequence: Synthetic peptide
GFSLSSYA

SEQ ID NO: 398 - protein, 7 aa, Artificial Sequence
  Description of Artificial Sequence: Synthetic peptide
IWAGGGT

SEQ ID NO: 399 - protein, 14 aa, Artificial Sequence
  Description of Artificial Sequence: Synthetic peptide
ARNFFYDYDDGMDY

SEQ ID NO: 400 - protein, 11 aa, Artificial Sequence
  Description of Artificial Sequence: Synthetic peptide
QSLVHSNGNTY

SEQ ID NO: 401 - protein, 3 aa, Artificial Sequence
  Description of Artificial Sequence: Synthetic peptide
KVS

SEQ ID NO: 402 - protein, 9 aa, Artificial Sequence
  Description of Artificial Sequence: Synthetic peptide
SQSTHVPLT

SEQ ID NO: 403 - protein, 5 aa, Artificial Sequence
  Description of Artificial Sequence: Synthetic peptide
SYAIS

SEQ ID NO: 404 - protein, 16 aa, Artificial Sequence
  Description of Artificial Sequence: Synthetic peptide
VIWAGGGTNYNSALKS

SEQ ID NO: 405 - protein, 12 aa, Artificial Sequence
  Description of Artificial Sequence: Synthetic peptide
NFFYDYDDGMDY

SEQ ID NO: 406 - protein, 16 aa, Artificial Sequence
  Description of Artificial Sequence: Synthetic peptide
RSSQSLVHSNGNTYLH

SEQ ID NO: 407 - protein, 7 aa, Artificial Sequence
  Description of Artificial Sequence: Synthetic peptide
KVSNRFS

SEQ ID NO: 408 - protein, 9 aa, Artificial Sequence
  Description of Artificial Sequence: Synthetic peptide
SQSTHVPLT

SEQ ID NO: 409 - protein, 7 aa, Artificial Sequence
  Description of Artificial Sequence: Synthetic peptide
GFSLSSY

SEQ ID NO: 410 - protein, 3 aa, Artificial Sequence
  Description of Artificial Sequence: Synthetic peptide
AGG

SEQ ID NO: 411 - protein, 10 aa, Artificial Sequence
  Description of Artificial Sequence: Synthetic peptide
FFYDYDDGMD

SEQ ID NO: 412 - protein, 12 aa, Artificial Sequence
  Description of Artificial Sequence: Synthetic peptide
SQSLVHSNGNTY

SEQ ID NO: 413 - protein, 3 aa, Artificial Sequence
  Description of Artificial Sequence: Synthetic peptide
KVS

SEQ ID NO: 414 - protein, 6 aa, Artificial Sequence
  Description of Artificial Sequence: Synthetic peptide
STHVPL

SEQ ID NO: 415 - protein, 7 aa, Artificial Sequence
  Description of Artificial Sequence: Synthetic peptide
GFSLSSY

SEQ ID NO: 416 - protein, 5 aa, Artificial Sequence
  Description of Artificial Sequence: Synthetic peptide
WAGGG

SEQ ID NO: 417 - protein, 11 aa, Artificial Sequence
  Description of Artificial Sequence: Synthetic peptide
NFFYDYDDGMD

SEQ ID NO: 418 - protein, 12 aa, Artificial Sequence
  Description of Artificial Sequence: Synthetic peptide
SQSLVHSNGNTY

SEQ ID NO: 419 - protein, 3 aa, Artificial Sequence
  Description of Artificial Sequence: Synthetic peptide
KVS

SEQ ID NO: 420 - protein, 6 aa, Artificial Sequence
  Description of Artificial Sequence: Synthetic peptide
STHVPL

SEQ ID NO: 421 - protein, 6 aa, Artificial Sequence
  Description of Artificial Sequence: Synthetic peptide
SSYAIS

SEQ ID NO: 422 - protein, 12 aa, Artificial Sequence
  Description of Artificial Sequence: Synthetic peptide
WLGVIWAGGGTN

SEQ ID NO: 423 - protein, 13 aa, Artificial Sequence
  Description of Artificial Sequence: Synthetic peptide
ARNFFYDYDDGMD

SEQ ID NO: 424 - protein, 12 aa, Artificial Sequence
  Description of Artificial Sequence: Synthetic peptide
VHSNGNTYLHWY

SEQ ID NO: 425 - protein, 10 aa, Artificial Sequence
  Description of Artificial Sequence: Synthetic peptide
LLIYKVSNRF

SEQ ID NO: 426 - protein, 8 aa, Artificial Sequence
  Description of Artificial Sequence: Synthetic peptide
SQSTHVPL

SEQ ID NO: 427 - protein, 10 aa, Artificial Sequence
  Description of Artificial Sequence: Synthetic peptide
GFSLSSYAIS

SEQ ID NO: 428 - protein, 9 aa, Artificial Sequence
  Description of Artificial Sequence: Synthetic peptide
VIWAGGGTN

SEQ ID NO: 429 - protein, 12 aa, Artificial Sequence
  Description of Artificial Sequence: Synthetic peptide
NFFYDYDDGMDY

SEQ ID NO: 430 - protein, 16 aa, Artificial Sequence
  Description of Artificial Sequence: Synthetic peptide
RSSQSLVHSNGNTYLH

SEQ ID NO: 431 - protein, 7 aa, Artificial Sequence
  Description of Artificial Sequence: Synthetic peptide
KVSNRFS

SEQ ID NO: 432 - protein, 9 aa, Artificial Sequence
  Description of Artificial Sequence: Synthetic peptide
SQSTHVPLT

SEQ ID NO: 433 - protein, 10 aa, Artificial Sequence
  Description of Artificial Sequence: Synthetic peptide
GYTFTNYGMN

SEQ ID NO: 434 - protein, 17 aa, Artificial Sequence
  Description of Artificial Sequence: Synthetic peptide
WINTYTGEPTYADDFKG

SEQ ID NO: 435 - protein, 10 aa, Artificial Sequence
  Description of Artificial Sequence: Synthetic peptide
PYFGDYAMDY

SEQ ID NO: 436 - protein, 11 aa, Artificial Sequence
  Description of Artificial Sequence: Synthetic peptide
RASENIYSNLA

SEQ ID NO: 437 - protein, 7 aa, Artificial Sequence
  Description of Artificial Sequence: Synthetic peptide
TATNLAD

SEQ ID NO: 438 - protein, 9 aa, Artificial Sequence
  Description of Artificial Sequence: Synthetic peptide
QHFWGNPWT

SEQ ID NO: 439 - protein, 8 aa, Artificial Sequence
  Description of Artificial Sequence: Synthetic peptide
GYTFTNYG

SEQ ID NO: 440 - protein, 8 aa, Artificial Sequence
  Description of Artificial Sequence: Synthetic peptide
INTYTGEP

SEQ ID NO: 441 - protein, 12 aa, Artificial Sequence
  Description of Artificial Sequence: Synthetic peptide
ARPYFGDYAMDY

SEQ ID NO: 442 - protein, 6 aa, Artificial Sequence
  Description of Artificial Sequence: Synthetic peptide
ENIYSN

SEQ ID NO: 443 - protein, 3 aa, Artificial Sequence
  Description of Artificial Sequence: Synthetic peptide
TAT

SEQ ID NO: 444 - protein, 9 aa, Artificial Sequence
  Description of Artificial Sequence: Synthetic peptide
QHFWGNPWT

SEQ ID NO: 445 - protein, 5 aa, Artificial Sequence
  Description of Artificial Sequence: Synthetic peptide
NYGMN

SEQ ID NO: 446 - protein, 17 aa, Artificial Sequence
  Description of Artificial Sequence: Synthetic peptide
WINTYTGEPTYADDFKG

SEQ ID NO: 447 - protein, 10 aa, Artificial Sequence
  Description of Artificial Sequence: Synthetic peptide
PYFGDYAMDY

SEQ ID NO: 448 - protein, 11 aa, Artificial Sequence
  Description of Artificial Sequence: Synthetic peptide
RASENIYSNLA

SEQ ID NO: 449 - protein, 7 aa, Artificial Sequence
  Description of Artificial Sequence: Synthetic peptide
TATNLAD

SEQ ID NO: 450 - protein, 9 aa, Artificial Sequence
  Description of Artificial Sequence: Synthetic peptide
QHFWGNPWT

SEQ ID NO: 451 - protein, 7 aa, Artificial Sequence
  Description of Artificial Sequence: Synthetic peptide
GYTFTNY

SEQ ID NO: 452 - protein, 4 aa, Artificial Sequence
  Description of Artificial Sequence: Synthetic peptide
TYTG

SEQ ID NO: 453 - protein, 8 aa, Artificial Sequence
  Description of Artificial Sequence: Synthetic peptide
YFGDYAMD

SEQ ID NO: 454 - protein, 7 aa, Artificial Sequence
  Description of Artificial Sequence: Synthetic peptide
SENIYSN

SEQ ID NO: 455 - protein, 3 aa, Artificial Sequence
  Description of Artificial Sequence: Synthetic peptide
TAT

SEQ ID NO: 456 - protein, 6 aa, Artificial Sequence
  Description of Artificial Sequence: Synthetic peptide
FWGNPW

SEQ ID NO: 457 - protein, 7 aa, Artificial Sequence
  Description of Artificial Sequence: Synthetic peptide
GYTFTNY

SEQ ID NO: 458 - protein, 6 aa, Artificial Sequence
  Description of Artificial Sequence: Synthetic peptide
NTYTGE

SEQ ID NO: 459 - protein, 9 aa, Artificial Sequence
  Description of Artificial Sequence: Synthetic peptide
PYFGDYAMD

SEQ ID NO: 460 - protein, 7 aa, Artificial Sequence
  Description of Artificial Sequence: Synthetic peptide
SENIYSN

SEQ ID NO: 461 - protein, 3 aa, Artificial Sequence
  Description of Artificial Sequence: Synthetic peptide
TAT

SEQ ID NO: 462 - protein, 6 aa, Artificial Sequence
  Description of Artificial Sequence: Synthetic peptide
FWGNPW

SEQ ID NO: 463 - protein, 6 aa, Artificial Sequence
  Description of Artificial Sequence: Synthetic peptide
TNYGMN

SEQ ID NO: 464 - protein, 13 aa, Artificial Sequence
  Description of Artificial Sequence: Synthetic peptide
WMGWINTYTGEPT

SEQ ID NO: 465 - protein, 11 aa, Artificial Sequence
  Description of Artificial Sequence: Synthetic peptide
ARPYFGDYAMD

SEQ ID NO: 466 - protein, 7 aa, Artificial Sequence
  Description of Artificial Sequence: Synthetic peptide
YSNLAWY

SEQ ID NO: 467 - protein, 10 aa, Artificial Sequence
  Description of Artificial Sequence: Synthetic peptide
VLVYTATNLA

SEQ ID NO: 468 - protein, 8 aa, Artificial Sequence
  Description of Artificial Sequence: Synthetic peptide
QHFWGNPW

SEQ ID NO: 469 - protein, 10 aa, Artificial Sequence
  Description of Artificial Sequence: Synthetic peptide
GYTFTNYGMN

SEQ ID NO: 470 - protein, 10 aa, Artificial Sequence
  Description of Artificial Sequence: Synthetic peptide
WINTYTGEPT

SEQ ID NO: 471 - protein, 10 aa, Artificial Sequence
  Description of Artificial Sequence: Synthetic peptide
PYFGDYAMDY

SEQ ID NO: 472 - protein, 11 aa, Artificial Sequence
  Description of Artificial Sequence: Synthetic peptide
RASENIYSNLA

SEQ ID NO: 473 - protein, 7 aa, Artificial Sequence
  Description of Artificial Sequence: Synthetic peptide
TATNLAD

SEQ ID NO: 474 - protein, 9 aa, Artificial Sequence
  Description of Artificial Sequence: Synthetic peptide
QHFWGNPWT

SEQ ID NO: 475 - protein, 10 aa, Artificial Sequence
  Description of Artificial Sequence: Synthetic peptide
GFSLTSYAIS

SEQ ID NO: 476 - protein, 16 aa, Artificial Sequence
  Description of Artificial Sequence: Synthetic peptide
IIWAGGGTNYNSALKS

SEQ ID NO: 477 - protein, 12 aa, Artificial Sequence
  Description of Artificial Sequence: Synthetic peptide
NPFYDYDEGLDY

SEQ ID NO: 478 - protein, 16 aa, Artificial Sequence
  Description of Artificial Sequence: Synthetic peptide
RSSQSLVHSNGNTYLH

SEQ ID NO: 479 - protein, 7 aa, Artificial Sequence
  Description of Artificial Sequence: Synthetic peptide
KVSNRFS

SEQ ID NO: 480 - protein, 9 aa, Artificial Sequence
  Description of Artificial Sequence: Synthetic peptide
SQSTHVPWT

SEQ ID NO: 481 - protein, 8 aa, Artificial Sequence
  Description of Artificial Sequence: Synthetic peptide
GFSLTSYA

SEQ ID NO: 482 - protein, 7 aa, Artificial Sequence
  Description of Artificial Sequence: Synthetic peptide
IWAGGGT

SEQ ID NO: 483 - protein, 14 aa, Artificial Sequence
  Description of Artificial Sequence: Synthetic peptide
ARNPFYDYDEGLDY

SEQ ID NO: 484 - protein, 11 aa, Artificial Sequence
  Description of Artificial Sequence: Synthetic peptide
QSLVHSNGNTY

SEQ ID NO: 485 - protein, 3 aa, Artificial Sequence
  Description of Artificial Sequence: Synthetic peptide
KVS

SEQ ID NO: 486 - protein, 9 aa, Artificial Sequence
  Description of Artificial Sequence: Synthetic peptide
SQSTHVPWT

SEQ ID NO: 487 - protein, 5 aa, Artificial Sequence
  Description of Artificial Sequence: Synthetic peptide
SYAIS

SEQ ID NO: 488 - protein, 16 aa, Artificial Sequence
  Description of Artificial Sequence: Synthetic peptide
IIWAGGGTNYNSALKS

SEQ ID NO: 489 - protein, 12 aa, Artificial Sequence
  Description of Artificial Sequence: Synthetic peptide
NPFYDYDEGLDY

SEQ ID NO: 490 - protein, 16 aa, Artificial Sequence
  Description of Artificial Sequence: Synthetic peptide
RSSQSLVHSNGNTYLH

SEQ ID NO: 491 - protein, 7 aa, Artificial Sequence
  Description of Artificial Sequence: Synthetic peptide
KVSNRFS

SEQ ID NO: 492 - protein, 9 aa, Artificial Sequence
  Description of Artificial Sequence: Synthetic peptide
SQSTHVPWT

SEQ ID NO: 493 - protein, 7 aa, Artificial Sequence
  Description of Artificial Sequence: Synthetic peptide
GFSLTSY

SEQ ID NO: 494 - protein, 3 aa, Artificial Sequence
  Description of Artificial Sequence: Synthetic peptide
AGG

SEQ ID NO: 495 - protein, 10 aa, Artificial Sequence
  Description of Artificial Sequence: Synthetic peptide
PFYDYDEGLD

SEQ ID NO: 496 - protein, 12 aa, Artificial Sequence
  Description of Artificial Sequence: Synthetic peptide
SQSLVHSNGNTY

SEQ ID NO: 497 - protein, 3 aa, Artificial Sequence
  Description of Artificial Sequence: Synthetic peptide
KVS

SEQ ID NO: 498 - protein, 6 aa, Artificial Sequence
  Description of Artificial Sequence: Synthetic peptide
STHVPW

SEQ ID NO: 499 - protein, 7 aa, Artificial Sequence
  Description of Artificial Sequence: Synthetic peptide
GFSLTSY

SEQ ID NO: 500 - protein, 5 aa, Artificial Sequence
  Description of Artificial Sequence: Synthetic peptide
WAGGG

SEQ ID NO: 501 - protein, 11 aa, Artificial Sequence
  Description of Artificial Sequence: Synthetic peptide
NPFYDYDEGLD

SEQ ID NO: 502 - protein, 12 aa, Artificial Sequence
  Description of Artificial Sequence: Synthetic peptide
SQSLVHSNGNTY

SEQ ID NO: 503 - protein, 3 aa, Artificial Sequence
  Description of Artificial Sequence: Synthetic peptide
KVS

SEQ ID NO: 504 - protein, 6 aa, Artificial Sequence
  Description of Artificial Sequence: Synthetic peptide
STHVPW

SEQ ID NO: 505 - protein, 6 aa, Artificial Sequence
  Description of Artificial Sequence: Synthetic peptide
TSYAIS

SEQ ID NO: 506 - protein, 12 aa, Artificial Sequence
  Description of Artificial Sequence: Synthetic peptide
WLGIIWAGGGTN

SEQ ID NO: 507 - protein, 13 aa, Artificial Sequence
  Description of Artificial Sequence: Synthetic peptide
ARNPFYDYDEGLD

SEQ ID NO: 508 - protein, 12 aa, Artificial Sequence
  Description of Artificial Sequence: Synthetic peptide
VHSNGNTYLHWY

SEQ ID NO: 509 - protein, 10 aa, Artificial Sequence
  Description of Artificial Sequence: Synthetic peptide
LLIYKVSNRF

SEQ ID NO: 510 - protein, 8 aa, Artificial Sequence
  Description of Artificial Sequence: Synthetic peptide
SQSTHVPW

SEQ ID NO: 511 - protein, 10 aa, Artificial Sequence
  Description of Artificial Sequence: Synthetic peptide
GFSLTSYAIS

SEQ ID NO: 512 - protein, 9 aa, Artificial Sequence
  Description of Artificial Sequence: Synthetic peptide
IIWAGGGTN

SEQ ID NO: 513 - protein, 12 aa, Artificial Sequence
  Description of Artificial Sequence: Synthetic peptide
NPFYDYDEGLDY

SEQ ID NO: 514 - protein, 16 aa, Artificial Sequence
  Description of Artificial Sequence: Synthetic peptide
RSSQSLVHSNGNTYLH

SEQ ID NO: 515 - protein, 7 aa, Artificial Sequence
  Description of Artificial Sequence: Synthetic peptide
KVSNRFS

SEQ ID NO: 516 - protein, 9 aa, Artificial Sequence
  Description of Artificial Sequence: Synthetic peptide
SQSTHVPWT

SEQ ID NO: 517 - protein, 10 aa, Artificial Sequence
  Description of Artificial Sequence: Synthetic peptide
GFSLTSYGVH

SEQ ID NO: 518 - protein, 16 aa, Artificial Sequence
  Description of Artificial Sequence: Synthetic peptide
VIWAGGNTNYNSTLMS

SEQ ID NO: 519 - protein, 11 aa, Artificial Sequence
  Description of Artificial Sequence: Synthetic peptide
GSFYDYLYFDY

SEQ ID NO: 520 - protein, 11 aa, Artificial Sequence
  Description of Artificial Sequence: Synthetic peptide
RASKSISKYLA

SEQ ID NO: 521 - protein, 7 aa, Artificial Sequence
  Description of Artificial Sequence: Synthetic peptide
SGSTLQS

SEQ ID NO: 522 - protein, 9 aa, Artificial Sequence
  Description of Artificial Sequence: Synthetic peptide
QQHNEYPLT

SEQ ID NO: 523 - protein, 8 aa, Artificial Sequence
  Description of Artificial Sequence: Synthetic peptide
GFSLTSYG

SEQ ID NO: 524 - protein, 7 aa, Artificial Sequence
  Description of Artificial Sequence: Synthetic peptide
IWAGGNT

SEQ ID NO: 525 - protein, 13 aa, Artificial Sequence
  Description of Artificial Sequence: Synthetic peptide
ARGSFYDYLYFDY

SEQ ID NO: 526 - protein, 6 aa, Artificial Sequence
  Description of Artificial Sequence: Synthetic peptide
KSISKY

SEQ ID NO: 527 - protein, 3 aa, Artificial Sequence
  Description of Artificial Sequence: Synthetic peptide
SGS

SEQ ID NO: 528 - protein, 9 aa, Artificial Sequence
  Description of Artificial Sequence: Synthetic peptide
QQHNEYPLT

SEQ ID NO: 529 - protein, 5 aa, Artificial Sequence
  Description of Artificial Sequence: Synthetic peptide
SYGVH

SEQ ID NO: 530 - protein, 16 aa, Artificial Sequence
  Description of Artificial Sequence: Synthetic peptide
VIWAGGNTNYNSTLMS

SEQ ID NO: 531 - protein, 11 aa, Artificial Sequence
  Description of Artificial Sequence: Synthetic peptide
GSFYDYLYFDY

SEQ ID NO: 532 - protein, 11 aa, Artificial Sequence
  Description of Artificial Sequence: Synthetic peptide
RASKSISKYLA

SEQ ID NO: 533 - protein, 7 aa, Artificial Sequence
  Description of Artificial Sequence: Synthetic peptide
SGSTLQS

SEQ ID NO: 534 - protein, 9 aa, Artificial Sequence
  Description of Artificial Sequence: Synthetic peptide
QQHNEYPLT

SEQ ID NO: 535 - protein, 7 aa, Artificial Sequence
  Description of Artificial Sequence: Synthetic peptide
GFSLTSY

SEQ ID NO: 536 - protein, 3 aa, Artificial Sequence
  Description of Artificial Sequence: Synthetic peptide
AGG

SEQ ID NO: 537 - protein, 9 aa, Artificial Sequence
  Description of Artificial Sequence: Synthetic peptide
SFYDYLYFD

SEQ ID NO: 538 - protein, 7 aa, Artificial Sequence
  Description of Artificial Sequence: Synthetic peptide
SKSISKY

SEQ ID NO: 539 - protein, 3 aa, Artificial Sequence
  Description of Artificial Sequence: Synthetic peptide
SGS

SEQ ID NO: 540 - protein, 6 aa, Artificial Sequence
  Description of Artificial Sequence: Synthetic peptide
HNEYPL

SEQ ID NO: 541 - protein, 7 aa, Artificial Sequence
  Description of Artificial Sequence: Synthetic peptide
GFSLTSY

SEQ ID NO: 542 - protein, 5 aa, Artificial Sequence
  Description of Artificial Sequence: Synthetic peptide
WAGGN

SEQ ID NO: 543 - protein, 10 aa, Artificial Sequence
  Description of Artificial Sequence: Synthetic peptide
GSFYDYLYFD

SEQ ID NO: 544 - protein, 7 aa, Artificial Sequence
  Description of Artificial Sequence: Synthetic peptide
SKSISKY

SEQ ID NO: 545 - protein, 3 aa, Artificial Sequence
  Description of Artificial Sequence: Synthetic peptide
SGS

SEQ ID NO: 546 - protein, 6 aa, Artificial Sequence
  Description of Artificial Sequence: Synthetic peptide
HNEYPL

SEQ ID NO: 547 - protein, 6 aa, Artificial Sequence
  Description of Artificial Sequence: Synthetic peptide
TSYGVH

SEQ ID NO: 548 - protein, 12 aa, Artificial Sequence
  Description of Artificial Sequence: Synthetic peptide
WLGVIWAGGNTN

SEQ ID NO: 549 - protein, 12 aa, Artificial Sequence
  Description of Artificial Sequence: Synthetic peptide
ARGSFYDYLYFD

SEQ ID NO: 550 - protein, 7 aa, Artificial Sequence
  Description of Artificial Sequence: Synthetic peptide
SKYLAWY

SEQ ID NO: 551 - protein, 10 aa, Artificial Sequence
  Description of Artificial Sequence: Synthetic peptide
LLIYSGSTLQ

SEQ ID NO: 552 - protein, 8 aa, Artificial Sequence
  Description of Artificial Sequence: Synthetic peptide
QQHNEYPL

SEQ ID NO: 553 - protein, 10 aa, Artificial Sequence
  Description of Artificial Sequence: Synthetic peptide
GFSLTSYGVH

SEQ ID NO: 554 - protein, 9 aa, Artificial Sequence
  Description of Artificial Sequence: Synthetic peptide
VIWAGGNTN

SEQ ID NO: 555 - protein, 11 aa, Artificial Sequence
  Description of Artificial Sequence: Synthetic peptide
GSFYDYLYFDY

SEQ ID NO: 556 - protein, 11 aa, Artificial Sequence
  Description of Artificial Sequence: Synthetic peptide
RASKSISKYLA

SEQ ID NO: 557 - protein, 7 aa, Artificial Sequence
  Description of Artificial Sequence: Synthetic peptide
SGSTLQS

SEQ ID NO: 558 - protein, 9 aa, Artificial Sequence
  Description of Artificial Sequence: Synthetic peptide
QQHNEYPLT

SEQ ID NO: 559 - protein, 502 aa, Artificial Sequence
  Description of Artificial Sequence: Synthetic polypeptide
MAWVWTLLFLMAAAQSIQAEIVLTQSPGTLSLSPGERATLSCRASQSISSSFLTWYQQKPGQAPRLLIYGASSRATGIPDRFSGGGSGTDFTLTISRLEPEDFAVYYCQHYGSSPMYTFGQGTKLEIKGGSEGKSSGSGSESKSTGGSEVQLLESGGGLVQPGGSLRLSCAASGFTFSSYAMSWVRQAPGKGLEWVSAISGSGGSTYYADSVKGRFTISRDNSKNTLYLQMNSLRAEDTAVYYCAKDEGYSSGHYYGMDVWGQGTTVTVSSEPKSSDKTHTCPPCPAPEAAGGPSVFLFPPKPKDTLMISRTPEVTCVVVSVSHEDPEVKFNWYVDGVEVHNAKTKPREEQYNSTYRVVSVLTVLHQDWLNGKEYKCKVSNKALPAPIEKTISKAKGQPREPQVYVLPPSREEMTKNQVSLLCLVKGFYPSDIAVEWESNGQPENNYLTWPPVLDSDGSFFLYSKLTVDKSRWQQGNVFSCSVMHEALHNHYTQKSLSLSPG

SEQ ID NO: 560 - protein, 475 aa, Artificial Sequence
  Description of Artificial Sequence: Synthetic polypeptide
VDGGITQSPKYLFRKEGQNVTLSCEQNLNHDAMYWYRQDPGQGLRLIYYSQIVNDFQKGDIAEGYSVSREKKESFPLTVTSAQKNPTAFYLCASSSRSSYEQYFGPGTRLTVTEDLKNVFPPEVAVFEPSEAEISHTQKATLVCLATGFYPDHVELSWWVNGKEVHSGVSTDPQPLKEQPALNDSRYSLSSRLRVSATFWQNPRNHFRCQVQFYGLSENDEWTQDRAKPVTQIVSAEAWGRADEPKSCDKTHTCPPCPAPELLGGPSVFLFPPKPKDTLMISRTPEVTCVVVDVSHEDPEVKFNWYVDGVEVHNAKTKPREEQYNSTYRVVSVLTVLHQDWLNGKEYKCKVSNKALPAPIEKTISKAKGQPREPQVYVLPPSREEMTKNQVSLLCLVKGFYPSDIAVEWESNGQPENNYLTWPPVLDSDGSFFLYSKLTVDKSRWQQGNVFSCSVMHEALHNHYTQKSLSLSPGK

SEQ ID NO: 561 - protein, 431 aa, Artificial Sequence
  Description of Artificial Sequence: Synthetic polypeptide
QLLEQSPQFLSIQEGENLTVYCNSSSVFSSLQWYRQEPGEGPVLLVTVVTGGEVKKLKRLTFQFGDARKDSSLHITAAQPGDTGLYLCAGAGSQGNLIFGKGTKLSVKPNIQNPDPAVYQLRDSKSSDKSVCLFTDFDSQTNVSQSKDSDVYITDKTVLDMRSMDFKSNSAVAWSNKSDFACANAFNNSIIPEDTFFPSEPKSCDKTHTCPPCPAPELLGGPSVFLFPPKPKDTLMISRTPEVTCVVVDVSHEDPEVKFNWYVDGVEVHNAKTKPREEQYNSTYRVVSVLTVLHQDWLNGKEYKCKVSNKALPAPIEKTISKAKGQPREPQVYVYPPSREEMTKNQVSLTCLVKGFYPSDIAVEWESNGQPENNYKTTPPVLDSDGSFALVSKLTVDKSRWQQGNVFSCSVMHEALHNHYTQKSLSLSPGK

SEQ ID NO: 562 - protein, 467 aa, Artificial Sequence
  Description of Artificial Sequence: Synthetic polypeptide
MAWVWTLLFLMAAAQSIQAQVQLKESGPGLVAPSQSLSITCTVSGFSLTSYGVHWVRQPPGKGLEWLGIIWAGGGTNYNSALMSRLSITKDNSKSQVSLKMNSLQTDDTAMYYCARGTFFNYDYFDYWGQGTTLTVSSASTKGPSVFPLAPSSKSTSGGTAALGCLVKDYFPEPVTVSWNSGALTSGVHTFPAVLQSSGLYSLSSVVTVPSSSLGTQTYICNVNHKPSNTKVDKKVEPKSCDKTHTCPPCPAPEAAGGPSVFLFPPKPKDTLMISRTPEVTCVVVSVSHEDPEVKFNWYVDGVEVHNAKTKPREEQYNSTYRVVSVLTVLHQDWLNGKEYKCKVSNKALPAPIEKTISKAKGQPREPQVYVYPPSREEMTKNQVSLTCLVKGFYPSDIAVEWESNGQPENNYKTTPPVLDSDGSFALVSKLTVDKSRWQQGNVFSCSVMHEALHNRFTQKSLSLSPG

SEQ ID NO: 563 - protein, 233 aa, Artificial Sequence
  Description of Artificial Sequence: Synthetic polypeptide
MAWVWTLLFLMAAAQSIQADIVMTQSQKFMSTSVGDRVSITCKASQDVGTDVAWYQQKPGQSPKLMIYWASTRHTGVPDRFTGSGSGTDFTLTISNVQSEDLADYFCQQYSRYPWTFGAGTKLELKRTVAAPSVFIFPPSDEQLKSGTASVVCLLNNFYPREAKVQWKVDNALQSGNSQESVTEQDSKDSTYSLSSTLTLSKADYEKHKVYACEVTHQGLSSPVTKSFNRGEC

SEQ ID NO: 564 - protein, 467 aa, Artificial Sequence
  Description of Artificial Sequence: Synthetic polypeptide
MAWVWTLLFLMAAAQSIQAQVQLKESGPVLVAPSQSLSITCTVSGFSLTSYGVHWVRQPPGKGLEWLGIIWAGGNTNSNSALMSRLSISKDNSKSQVFLKMNSLQTDDTAMYYCARGSFYSYLYFDYWGQGTTLTVSSASTKGPSVFPLAPSSKSTSGGTAALGCLVKDYFPEPVTVSWNSGALTSGVHTFPAVLQSSGLYSLSSVVTVPSSSLGTQTYICNVNHKPSNTKVDKKVEPKSCDKTHTCPPCPAPEAAGGPSVFLFPPKPKDTLMISRTPEVTCVVVSVSHEDPEVKFNWYVDGVEVHNAKTKPREEQYNSTYRVVSVLTVLHQDWLNGKEYKCKVSNKALPAPIEKTISKAKGQPREPQVYVYPPSREEMTKNQVSLTCLVKGFYPSDIAVEWESNGQPENNYKTTPPVLDSDGSFALVSKLTVDKSRWQQGNVFSCSVMHEALHNRFTQKSLSLSPG

SEQ ID NO: 565 - protein, 233 aa, Artificial Sequence
  Description of Artificial Sequence: Synthetic polypeptide
MAWVWTLLFLMAAAQSIQADIVMTQSPSYLAASPGETITINCRASKSISKYLAWYQEKPGKTNKLLIYSGSTLQSGIPSRFSGSGSGTDFTLTISSLEPEDFAMYYCQQHNDYPLTFGAGTKLELKRTVAAPSVFIFPPSDEQLKSGTASVVCLLNNFYPREAKVQWKVDNALQSGNSQESVTEQDSKDSTYSLSSTLTLSKADYEKHKVYACEVTHQGLSSPVTKSFNRGEC

SEQ ID NO: 566 - protein, 468 aa, Artificial Sequence
  Description of Artificial Sequence: Synthetic polypeptide
MAWVWTLLFLMAAAQSIQAQITLKESGPTLVKPTQTLTLTCTFSGFSLSTSGMGVSWIRQPPGKALEWLAHIYWDDDKRYNPSLKSRLTITKDTSKNQVVLTMTNMDPVDTATYYCARLYGFTYGFAYWGQGTLVTVSSASTKGPSVFPLAPSSKSTSGGTAALGCLVKDYFPEPVTVSWNSGALTSGVHTFPAVLQSSGLYSLSSVVTVPSSSLGTQTYICNVNHKPSNTKVDKKVEPKSCDKTHTCPPCPAPEAAGGPSVFLFPPKPKDTLMISRTPEVTCVVVSVSHEDPEVKFNWYVDGVEVHNAKTKPREEQYNSTYRVVSVLTVLHQDWLNGKEYKCKVSNKALPAPIEKTISKAKGQPREPQVYVYPPSREEMTKNQVSLTCLVKGFYPSDIAVEWESNGQPENNYKTTPPVLDSDGSFALVSKLTVDKSRWQQGNVFSCSVMHEALHNRFTQKSLSLSPG

SEQ ID NO: 567 - protein, 238 aa, Artificial Sequence
  Description of Artificial Sequence: Synthetic polypeptide
METHSQVFVYMLLWLSGVEGDIVMTQSPDSLAVSLGERATINCRASQSVDYNGISYMHWYQQKPGQPPKLLIYAASNPESGVPDRFSGSGSGTDFTLTISSLQAEDVAVYYCQQIIEDPWTFGQGTKVEIKRTVAAPSVFIFPPSDEQLKSGTASVVCLLNNFYPREAKVQWKVDNALQSGNSQESVTEQDSKDSTYSLSSTLTLSKADYEKHKVYACEVTHQGLSSPVTKSFNRGEC

SEQ ID NO: 568 - protein, 466 aa, Artificial Sequence
  Description of Artificial Sequence: Synthetic polypeptide
MAWVWTLLFLMAAAQSIQAQVQLQQSGPELVKPGASVKMSCKASGNTIPTYVMHWVKLKPGQGLEWIGYINPYNDGTKYNEKFKGKATLTSDKSSSTAYMELSSLTSEDSAVYYCAKDGTYVEFAYWGQGTLVTVSAASTKGPSVFPLAPSSKSTSGGTAALGCLVKDYFPEPVTVSWNSGALTSGVHTFPAVLQSSGLYSLSSVVTVPSSSLGTQTYICNVNHKPSNTKVDKKVEPKSCDKTHTCPPCPAPEAAGGPSVFLFPPKPKDTLMISRTPEVTCVVVSVSHEDPEVKFNWYVDGVEVHNAKTKPREEQYNSTYRVVSVLTVLHQDWLNGKEYKCKVSNKALPAPIEKTISKAKGQPREPQVYVYPPSREEMTKNQVSLTCLVKGFYPSDIAVEWESNGQPENNYKTTPPVLDSDGSFALVSKLTVDKSRWQQGNVFSCSVMHEALHNRFTQKSLSLSPG

SEQ ID NO: 569 - protein, 233 aa, Artificial Sequence
  Description of Artificial Sequence: Synthetic polypeptide
MAWVWTLLFLMAAAQSIQADIVMTQSRKFMSTSVGDRVNITCKASQNIRTAVAWFQQRPGQSPKLLFYLASNRHTGVPDRFTGSGSGTDFTLTINDVQSEDLADYFCLQHWNYPYTFGSGTKLEMKRTVAAPSVFIFPPSDEQLKSGTASVVCLLNNFYPREAKVQWKVDNALQSGNSQESVTEQDSKDSTYSLSSTLTLSKADYEKHKVYACEVTHQGLSSPVTKSFNRGEC

SEQ ID NO: 570 - protein, 468 aa, Artificial Sequence
  Description of Artificial Sequence: Synthetic polypeptide
MAWVWTLLFLMAAAQSIQAEVQLQQSGPELVKPGASVKMSCKASGYTFTRYVIHWMKQKPGQGLEWIGYVNPYNNGTKYTEKFKGKATLTSDKSSSTAYMELNSLTSEDSAVYYCARPRLSGEDAMEYWGQGTSVTVSSASTKGPSVFPLAPSSKSTSGGTAALGCLVKDYFPEPVTVSWNSGALTSGVHTFPAVLQSSGLYSLSSVVTVPSSSLGTQTYICNVNHKPSNTKVDKKVEPKSCDKTHTCPPCPAPEAAGGPSVFLFPPKPKDTLMISRTPEVTCVVVSVSHEDPEVKFNWYVDGVEVHNAKTKPREEQYNSTYRVVSVLTVLHQDWLNGKEYKCKVSNKALPAPIEKTISKAKGQPREPQVYVYPPSREEMTKNQVSLTCLVKGFYPSDIAVEWESNGQPENNYKTTPPVLDSDGSFALVSKLTVDKSRWQQGNVFSCSVMHEALHNRFTQKSLSLSPG

SEQ ID NO: 571 - protein, 233 aa, Artificial Sequence
  Description of Artificial Sequence: Synthetic polypeptide
MAWVWTLLFLMAAAQSIQADIQMTQSPKSMSMSVGERVTLTCKASENVVTYVSWYQQKPEQSPKLLIYGASNRYTGVPDRFTGSGSATDFTLTISSVQAEDLAEYHCGQSHSFPYTFGSGTKLELKRTVAAPSVFIFPPSDEQLKSGTASVVCLLNNFYPREAKVQWKVDNALQSGNSQESVTEQDSKDSTYSLSSTLTLSKADYEKHKVYACEVTHQGLSSPVTKSFNRGEC

SEQ ID NO: 572 - protein, 469 aa, Artificial Sequence
  Description of Artificial Sequence: Synthetic polypeptide
MAWVWTLLFLMAAAQSIQADVQLQESGPGLVAPSQSLSITCTVSGFSLSSYAISWVRQPPGKGLEWLGVIWAGGGTNYNSALKSRLSISKDNSKSQVFLKMKSLQTDDTARYYCARNFFYDYDDGMDYWGQGTTVTVSSASTKGPSVFPLAPSSKSTSGGTAALGCLVKDYFPEPVTVSWNSGALTSGVHTFPAVLQSSGLYSLSSVVTVPSSSLGTQTYICNVNHKPSNTKVDKKVEPKSCDKTHTCPPCPAPELLGGPSVFLFPPKPKDTLMISRTPEVTCVVVDVSHEDPEVKFNWYVDGVEVHNAKTKPREEQYNSTYRVVSVLTVLHQDWLNGKEYKCKVSNKALPAPIEKTISKAKGQPREPQVYTLPPSREEMTKNQVSLTCLVKGFYPSDIAVEWESNGQPENNYKTTPPVLDSDGSFFLYSKLTVDKSRWQQGNVFSCSVMHEALHNHYTQKSLSLSPGK

SEQ ID NO: 573 - protein, 242 aa, Artificial Sequence
  Description of Artificial Sequence: Synthetic polypeptide
MARSALLILALLLLGLFSPGAWGNTQMNQTPLSLPVSLGDQASISCRSSQSLVHSNGNTYLHWYLQKPGQSPKLLIYKVSNRFSGVPDRFSGSGSGTDFTLKINRVEAEDLGVYFCSQSTHVPLTFGAGTRLEIKRTVAAPSVFIFPPSDEQLKSGTASVVCLLNNFYPREAKVQWKVDNALQSGNSQESVTEQDSKDSTYSLSSTLTLSKADYEKHKVYACEVTHQGLSSPVTKSFNRGEC

SEQ ID NO: 574 - protein, 468 aa, Artificial Sequence
  Description of Artificial Sequence: Synthetic polypeptide
MAWVWTLLFLMAAAQSIQAQIQLVQSGPELKKPGETVKISCKASGYTFTNYGMNWVKQAPGKGLKWMGWINTYTGEPTYADDFKGRFAFSLETSASTAYLQINNLKNEDMATYFCARPYFGDYAMDYWGQGTLVTVSAASTKGPSVFPLAPSSKSTSGGTAALGCLVKDYFPEPVTVSWNSGALTSGVHTFPAVLQSSGLYSLSSVVTVPSSSLGTQTYICNVNHKPSNTKVDKKVEPKSCDKTHTCPPCPAPELLGGPSVFLFPPKPKDTLMISRTPEVTCVVVDVSHEDPEVKFNWYVDGVEVHNAKTKPREEQYNSTYRVVSVLTVLHQDWLNGKEYKCKVSNKALPAPIEKTISKAKGQPREPQVYTLPPSREEMTKNQVSLTCLVKGFYPSDIAVEWESNGQPENNYKTTPPVLDSDGSFFLYSKLTVDKSRWQQGNVFSCSVMHEALHNHYTQKSLSLSPGK

SEQ ID NO: 575 - protein, 237 aa, Artificial Sequence
  Description of Artificial Sequence: Synthetic polypeptide
MARSALLILALLLLGLFSPGAWGDVQMIQSPASLSVSVGETVTITCRASENIYSNLAWYQQKQGKSPQVLVYTATNLADGVPSRFSGSGSGTQYSLKINSLQSEDFGSYYCQHFWGNPWTFGGGTKLEIKRTVAAPSVFIFPPSDEQLKSGTASVVCLLNNFYPREAKVQWKVDNALQSGNSQESVTEQDSKDSTYSLSSTLTLSKADYEKHKVYACEVTHQGLSSPVTKSFNRGEC

SEQ ID NO: 576 - protein, 469 aa, Artificial Sequence
  Description of Artificial Sequence: Synthetic polypeptide
MAWVWTLLFLMAAAQSIQAQVQLQQSGPGLVAPSQSLSITCTVSGFSLTSYAISWIRQPPGKGLEWLGIIWAGGGTNYNSALKSRLSISKDNSKSQVFLKMNSLQIDDTARYYCARNPFYDYDEGLDYWGQGTTLTVSSASTKGPSVFPLAPSSKSTSGGTAALGCLVKDYFPEPVTVSWNSGALTSGVHTFPAVLQSSGLYSLSSVVTVPSSSLGTQTYICNVNHKPSNTKVDKKVEPKSCDKTHTCPPCPAPELLGGPSVFLFPPKPKDTLMISRTPEVTCVVVDVSHEDPEVKFNWYVDGVEVHNAKTKPREEQYNSTYRVVSVLTVLHQDWLNGKEYKCKVSNKALPAPIEKTISKAKGQPREPQVYTLPPSREEMTKNQVSLTCLVKGFYPSDIAVEWESNGQPENNYKTTPPVLDSDGSFFLYSKLTVDKSRWQQGNVFSCSVMHEALHNHYTQKSLSLSPGK

SEQ ID NO: 577 - protein, 242 aa, Artificial Sequence
  Description of Artificial Sequence: Synthetic polypeptide
MARSALLILALLLLGLFSPGAWGDIVMTQSPLSLPVSLGDQASISCRSSQSLVHSNGNTYLHWYLQKPGQSPKLLIYKVSNRFSGVPDRFSGSGSGTDFTLKISRVEAEDLGVYFCSQSTHVPWTFGGGTKLEIKRTVAAPSVFIFPPSDEQLKSGTASVVCLLNNFYPREAKVQWKVDNALQSGNSQESVTEQDSKDSTYSLSSTLTLSKADYEKHKVYACEVTHQGLSSPVTKSFNRGEC

SEQ ID NO: 578 - protein, 468 aa, Artificial Sequence
  Description of Artificial Sequence: Synthetic polypeptide
MAWVWTLLFLMAAAQSIQAQVQLKESGPVLVAPSQSLSITCTVSGFSLTSYGVHWIRQPPGKGLEWLGVIWAGGNTNYNSTLMSRLSISKDNSKSQVFLKMNSLQTDDTAMYYCARGSFYDYLYFDYWGQGTTLTVSSASTKGPSVFPLAPSSKSTSGGTAALGCLVKDYFPEPVTVSWNSGALTSGVHTFPAVLQSSGLYSLSSVVTVPSSSLGTQTYICNVNHKPSNTKVDKKVEPKSCDKTHTCPPCPAPELLGGPSVFLFPPKPKDTLMISRTPEVTCVVVDVSHEDPEVKFNWYVDGVEVHNAKTKPREEQYNSTYRVVSVLTVLHQDWLNGKEYKCKVSNKALPAPIEKTISKAKGQPREPQVYTLPPSREEMTKNQVSLTCLVKGFYPSDIAVEWESNGQPENNYKTTPPVLDSDGSFFLYSKLTVDKSRWQQGNVFSCSVMHEALHNHYTQKSLSLSPGK

SEQ ID NO: 579 - protein, 237 aa, Artificial Sequence
  Description of Artificial Sequence: Synthetic polypeptide
MARSALLILALLLLGLFSPGAWGDIQMTQSPSYLAASPGETITINCRASKSISKYLAWYQEKPGKTNELLIYSGSTLQSGIPSRFSGSGSGTDFTLTISSLEPEDFAMYYCQQHNEYPLTFGGGTKLEIKRTVAAPSVFIFPPSDEQLKSGTASVVCLLNNFYPREAKVQWKVDNALQSGNSQESVTEQDSKDSTYSLSSTLTLSKADYEKHKVYACEVTHQGLSSPVTKSFNRGEC

SEQ ID NO: 580-621 - skipped (42 entries)

SEQ ID NO: 622 - protein, 10 aa, Artificial Sequence
  BCMB519 VH CDR1 (Exemplary)
GFTFSSYAMS

SEQ ID NO: 623 - protein, 17 aa, Artificial Sequence
  BCMB519 VH CDR2 (Exemplary)
AISGSGGSTYYADSVKG

SEQ ID NO: 624 - protein, 14 aa, Artificial Sequence
  BCMB519 VH CDR3 (Exemplary)
DEGYSSGHYYGMDV

SEQ ID NO: 625 - protein, 12 aa, Artificial Sequence
  BCMB519 VL CDR1 (Exemplary)
RASQSISSSFLT

SEQ ID NO: 626 - protein, 7 aa, Artificial Sequence
  BCMB519 VL CDR2 (Exemplary)
GASSRAT

SEQ ID NO: 627 - protein, 10 aa, Artificial Sequence
  BCMB519 VL CDR3 (Exemplary)
QHYGSSPMYT

SEQ ID NO: 628 - protein, 8 aa, Artificial Sequence
  BCMB519 VH CDR1 (IMGT)
GFTFSSYA

SEQ ID NO: 629 - protein, 8 aa, Artificial Sequence
  BCMB519 VH CDR2 (IMGT)
ISGSGGST

SEQ ID NO: 630 - protein, 16 aa, Artificial Sequence
  BCMB519 VH CDR3 (IMGT)
AKDEGYSSGHYYGMDV

SEQ ID NO: 631 - protein, 7 aa, Artificial Sequence
  BCMB519 VL CDR1 (IMGT)
QSISSSF

SEQ ID NO: 632 - protein, 3 aa, Artificial Sequence
  BCMB519 VL CDR2 (IMGT)
GAS

SEQ ID NO: 633 - protein, 10 aa, Artificial Sequence
  BCMB519 VL CDR3 (IMGT)
QHYGSSPMYT

SEQ ID NO: 634 - protein, 5 aa, Artificial Sequence
  BCMB519 VH CDR1 (Kabat)
SYAMS

SEQ ID NO: 635 - protein, 17 aa, Artificial Sequence
  BCMB519 VH CDR2 (Kabat)
AISGSGGSTYYADSVKG

SEQ ID NO: 636 - protein, 14 aa, Artificial Sequence
  BCMB519 VH CDR3 (Kabat)
DEGYSSGHYYGMDV

SEQ ID NO: 637 - protein, 12 aa, Artificial Sequence
  BCMB519 VL CDR1 (Kabat)
RASQSISSSFLT

SEQ ID NO: 638 - protein, 7 aa, Artificial Sequence
  BCMB519 VL CDR2 (Kabat)
GASSRAT

SEQ ID NO: 639 - protein, 10 aa, Artificial Sequence
  BCMB519 VL CDR3 (Kabat)
QHYGSSPMYT

SEQ ID NO: 640 - protein, 7 aa, Artificial Sequence
  BCMB519 VH CDR1 (Chothia v.1)
GFTFSSY

SEQ ID NO: 641 - protein, 4 aa, Artificial Sequence
  BCMB519 VH CDR2 (Chothia v.1)
GSGG

SEQ ID NO: 642 - protein, 12 aa, Artificial Sequence
  BCMB519 VH CDR3 (Chothia v.1)
EGYSSGHYYGMD

SEQ ID NO: 643 - protein, 8 aa, Artificial Sequence
  BCMB519 VL CDR1 (Chothia v.1)
SQSISSSF

SEQ ID NO: 644 - protein, 3 aa, Artificial Sequence
  BCMB519 VL CDR2 (Chothia v.1)
GAS

SEQ ID NO: 645 - protein, 7 aa, Artificial Sequence
  BCMB519 VL CDR3 (Chothia v.1)
YGSSPMY

SEQ ID NO: 646 - protein, 7 aa, Artificial Sequence
  BCMB519 VH CDR1 (Chothia v.2)
GFTFSSY

SEQ ID NO: 647 - protein, 5 aa, Artificial Sequence
  BCMB519 VH CDR2 (Chothia v.2)
SGSGG

SEQ ID NO: 648 - protein, 13 aa, Artificial Sequence
  BCMB519 VH CDR3 (Chothia v.2)
DEGYSSGHYYGMD

SEQ ID NO: 649 - protein, 8 aa, Artificial Sequence
  BCMB519 VL CDR1 (Chothia v.2)
SQSISSSF

SEQ ID NO: 650 - protein, 3 aa, Artificial Sequence
  BCMB519 VL CDR2 (Chothia v.2)
GAS

SEQ ID NO: 651 - protein, 7 aa, Artificial Sequence
  BCMB519 VL CDR3 (Chothia v.2)
YGSSPMY

SEQ ID NO: 652 - protein, 6 aa, Artificial Sequence
  BCMB519 VH CDR1 (Contact)
SSYAMS

SEQ ID NO: 653 - protein, 13 aa, Artificial Sequence
  BCMB519 VH CDR2 (Contact)
WVSAISGSGGSTY

SEQ ID NO: 654 - protein, 15 aa, Artificial Sequence
  BCMB519 VH CDR3 (Contact)
AKDEGYSSGHYYGMD

SEQ ID NO: 655 - protein, 8 aa, Artificial Sequence
  BCMB519 VL CDR1 (Contact)
SSSFLTWY

SEQ ID NO: 656 - protein, 10 aa, Artificial Sequence
  BCMB519 VL CDR2 (Contact)
LLIYGASSRA

SEQ ID NO: 657 - protein, 9 aa, Artificial Sequence
  BCMB519 VL CDR3 (Contact)
QHYGSSPMY

SEQ ID NO: 658 - protein, 10 aa, Artificial Sequence
  BCMB519 VH CDR1 (AbM)
GFTFSSYAMS

SEQ ID NO: 659 - protein, 10 aa, Artificial Sequence
  BCMB519 VH CDR2 (AbM)
AISGSGGSTY

SEQ ID NO: 660 - protein, 14 aa, Artificial Sequence
  BCMB519 VH CDR3 (AbM)
DEGYSSGHYYGMDV

SEQ ID NO: 661 - protein, 12 aa, Artificial Sequence
  BCMB519 VL CDR1 (AbM)
RASQSISSSFLT

SEQ ID NO: 662 - protein, 7 aa, Artificial Sequence
  BCMB519 VL CDR2 (AbM)
GASSRAT

SEQ ID NO: 663 - protein, 10 aa, Artificial Sequence
  BCMB519 VL CDR3 (AbM)
QHYGSSPMYT

SEQ ID NO: 664 - protein, 448 aa, Artificial Sequence
  Description of Artificial Sequence: Synthetic polypeptide
QVQLKESGPGLVAPSQSLSITCTVSGFSLTSYGVHWVRQPPGKGLEWLGIIWAGGGTNYNSALMSRLSITKDNSKSQVSLKMNSLQTDDTAMYYCARGTFFNYDYFDYWGQGTTLTVSSASTKGPSVFPLAPSSKSTSGGTAALGCLVKDYFPEPVTVSWNSGALTSGVHTFPAVLQSSGLYSLSSVVTVPSSSLGTQTYICNVNHKPSNTKVDKKVEPKSCDKTHTCPPCPAPEAAGGPSVFLFPPKPKDTLMISRTPEVTCVVVSVSHEDPEVKFNWYVDGVEVHNAKTKPREEQYNSTYRVVSVLTVLHQDWLNGKEYKCKVSNKALPAPIEKTISKAKGQPREPQVYVYPPSREEMTKNQVSLTCLVKGFYPSDIAVEWESNGQPENNYKTTPPVLDSDGSFALVSKLTVDKSRWQQGNVFSCSVMHEALHNRFTQKSLSLSPG

SEQ ID NO: 665 - protein, 214 aa, Artificial Sequence
  Description of Artificial Sequence: Synthetic polypeptide
DIVMTQSQKFMSTSVGDRVSITCKASQDVGTDVAWYQQKPGQSPKLMIYWASTRHTGVPDRFTGSGSGTDFTLTISNVQSEDLADYFCQQYSRYPWTFGAGTKLELKRTVAAPSVFIFPPSDEQLKSGTASVVCLLNNFYPREAKVQWKVDNALQSGNSQESVTEQDSKDSTYSLSSTLTLSKADYEKHKVYACEVTHQGLSSPVTKSFNRGEC

SEQ ID NO: 666 - protein, 448 aa, Artificial Sequence
  Description of Artificial Sequence: Synthetic polypeptide
QVQLKESGPVLVAPSQSLSITCTVSGFSLTSYGVHWVRQPPGKGLEWLGIIWAGGNTNSNSALMSRLSISKDNSKSQVFLKMNSLQTDDTAMYYCARGSFYSYLYFDYWGQGTTLTVSSASTKGPSVFPLAPSSKSTSGGTAALGCLVKDYFPEPVTVSWNSGALTSGVHTFPAVLQSSGLYSLSSVVTVPSSSLGTQTYICNVNHKPSNTKVDKKVEPKSCDKTHTCPPCPAPEAAGGPSVFLFPPKPKDTLMISRTPEVTCVVVSVSHEDPEVKFNWYVDGVEVHNAKTKPREEQYNSTYRVVSVLTVLHQDWLNGKEYKCKVSNKALPAPIEKTISKAKGQPREPQVYVYPPSREEMTKNQVSLTCLVKGFYPSDIAVEWESNGQPENNYKTTPPVLDSDGSFALVSKLTVDKSRWQQGNVFSCSVMHEALHNRFTQKSLSLSPG

SEQ ID NO: 667 - protein, 214 aa, Artificial Sequence
  Description of Artificial Sequence: Synthetic polypeptide
DIVMTQSPSYLAASPGETITINCRASKSISKYLAWYQEKPGKTNKLLIYSGSTLQSGIPSRFSGSGSGTDFTLTISSLEPEDFAMYYCQQHNDYPLTFGAGTKLELKRTVAAPSVFIFPPSDEQLKSGTASVVCLLNNFYPREAKVQWKVDNALQSGNSQESVTEQDSKDSTYSLSSTLTLSKADYEKHKVYACEVTHQGLSSPVTKSFNRGEC

SEQ ID NO: 668 - protein, 450 aa, Artificial Sequence
  Description of Artificial Sequence: Synthetic polypeptide
DVQLQESGPGLVAPSQSLSITCTVSGFSLSSYAISWVRQPPGKGLEWLGVIWAGGGTNYNSALKSRLSISKDNSKSQVFLKMKSLQTDDTARYYCARNFFYDYDDGMDYWGQGTTVTVSSASTKGPSVFPLAPSSKSTSGGTAALGCLVKDYFPEPVTVSWNSGALTSGVHTFPAVLQSSGLYSLSSVVTVPSSSLGTQTYICNVNHKPSNTKVDKKVEPKSCDKTHTCPPCPAPELLGGPSVFLFPPKPKDTLMISRTPEVTCVVVDVSHEDPEVKFNWYVDGVEVHNAKTKPREEQYNSTYRVVSVLTVLHQDWLNGKEYKCKVSNKALPAPIEKTISKAKGQPREPQVYTLPPSREEMTKNQVSLTCLVKGFYPSDIAVEWESNGQPENNYKTTPPVLDSDGSFFLYSKLTVDKSRWQQGNVFSCSVMHEALHNHYTQKSLSLSPGK

SEQ ID NO: 669 - protein, 219 aa, Artificial Sequence
  Description of Artificial Sequence: Synthetic polypeptide
NTQMNQTPLSLPVSLGDQASISCRSSQSLVHSNGNTYLHWYLQKPGQSPKLLIYKVSNRFSGVPDRFSGSGSGTDFTLKINRVEAEDLGVYFCSQSTHVPLTFGAGTRLEIKRTVAAPSVFIFPPSDEQLKSGTASVVCLLNNFYPREAKVQWKVDNALQSGNSQESVTEQDSKDSTYSLSSTLTLSKADYEKHKVYACEVTHQGLSSPVTKSFNRGEC

SEQ ID NO: 670 - protein, 449 aa, Artificial Sequence
  Description of Artificial Sequence: Synthetic polypeptide
QIQLVQSGPELKKPGETVKISCKASGYTFTNYGMNWVKQAPGKGLKWMGWINTYTGEPTYADDFKGRFAFSLETSASTAYLQINNLKNEDMATYFCARPYFGDYAMDYWGQGTLVTVSAASTKGPSVFPLAPSSKSTSGGTAALGCLVKDYFPEPVTVSWNSGALTSGVHTFPAVLQSSGLYSLSSVVTVPSSSLGTQTYICNVNHKPSNTKVDKKVEPKSCDKTHTCPPCPAPELLGGPSVFLFPPKPKDTLMISRTPEVTCVVVDVSHEDPEVKFNWYVDGVEVHNAKTKPREEQYNSTYRVVSVLTVLHQDWLNGKEYKCKVSNKALPAPIEKTISKAKGQPREPQVYTLPPSREEMTKNQVSLTCLVKGFYPSDIAVEWESNGQPENNYKTTPPVLDSDGSFFLYSKLTVDKSRWQQGNVFSCSVMHEALHNHYTQKSLSLSPGK

SEQ ID NO: 671 - protein, 214 aa, Artificial Sequence
  Description of Artificial Sequence: Synthetic polypeptide
DVQMIQSPASLSVSVGETVTITCRASENIYSNLAWYQQKQGKSPQVLVYTATNLADGVPSRFSGSGSGTQYSLKINSLQSEDFGSYYCQHFWGNPWTFGGGTKLEIKRTVAAPSVFIFPPSDEQLKSGTASVVCLLNNFYPREAKVQWKVDNALQSGNSQESVTEQDSKDSTYSLSSTLTLSKADYEKHKVYACEVTHQGLSSPVTKSFNRGEC

SEQ ID NO: 672 - protein, 450 aa, Artificial Sequence
  Description of Artificial Sequence: Synthetic polypeptide
QVQLQQSGPGLVAPSQSLSITCTVSGFSLTSYAISWIRQPPGKGLEWLGIIWAGGGTNYNSALKSRLSISKDNSKSQVFLKMNSLQIDDTARYYCARNPFYDYDEGLDYWGQGTTLTVSSASTKGPSVFPLAPSSKSTSGGTAALGCLVKDYFPEPVTVSWNSGALTSGVHTFPAVLQSSGLYSLSSVVTVPSSSLGTQTYICNVNHKPSNTKVDKKVEPKSCDKTHTCPPCPAPELLGGPSVFLFPPKPKDTLMISRTPEVTCVVVDVSHEDPEVKFNWYVDGVEVHNAKTKPREEQYNSTYRVVSVLTVLHQDWLNGKEYKCKVSNKALPAPIEKTISKAKGQPREPQVYTLPPSREEMTKNQVSLTCLVKGFYPSDIAVEWESNGQPENNYKTTPPVLDSDGSFFLYSKLTVDKSRWQQGNVFSCSVMHEALHNHYTQKSLSLSPGK

SEQ ID NO: 673 - protein, 219 aa, Artificial Sequence
  Description of Artificial Sequence: Synthetic polypeptide
DIVMTQSPLSLPVSLGDQASISCRSSQSLVHSNGNTYLHWYLQKPGQSPKLLIYKVSNRFSGVPDRFSGSGSGTDFTLKISRVEAEDLGVYFCSQSTHVPWTFGGGTKLEIKRTVAAPSVFIFPPSDEQLKSGTASVVCLLNNFYPREAKVQWKVDNALQSGNSQESVTEQDSKDSTYSLSSTLTLSKADYEKHKVYACEVTHQGLSSPVTKSFNRGEC

SEQ ID NO: 674 - protein, 449 aa, Artificial Sequence
  Description of Artificial Sequence: Synthetic polypeptide
QVQLKESGPVLVAPSQSLSITCTVSGFSLTSYGVHWIRQPPGKGLEWLGVIWAGGNTNYNSTLMSRLSISKDNSKSQVFLKMNSLQTDDTAMYYCARGSFYDYLYFDYWGQGTTLTVSSASTKGPSVFPLAPSSKSTSGGTAALGCLVKDYFPEPVTVSWNSGALTSGVHTFPAVLQSSGLYSLSSVVTVPSSSLGTQTYICNVNHKPSNTKVDKKVEPKSCDKTHTCPPCPAPELLGGPSVFLFPPKPKDTLMISRTPEVTCVVVDVSHEDPEVKFNWYVDGVEVHNAKTKPREEQYNSTYRVVSVLTVLHQDWLNGKEYKCKVSNKALPAPIEKTISKAKGQPREPQVYTLPPSREEMTKNQVSLTCLVKGFYPSDIAVEWESNGQPENNYKTTPPVLDSDGSFFLYSKLTVDKSRWQQGNVFSCSVMHEALHNHYTQKSLSLSPGK

SEQ ID NO: 675 - protein, 214 aa, Artificial Sequence
  Description of Artificial Sequence: Synthetic polypeptide
DIQMTQSPSYLAASPGETITINCRASKSISKYLAWYQEKPGKTNELLIYSGSTLQSGIPSRFSGSGSGTDFTLTISSLEPEDFAMYYCQQHNEYPLTFGGGTKLEIKRTVAAPSVFIFPPSDEQLKSGTASVVCLLNNFYPREAKVQWKVDNALQSGNSQESVTEQDSKDSTYSLSSTLTLSKADYEKHKVYACEVTHQGLSSPVTKSFNRGEC

SEQ ID NO: 676 - protein, 16 aa, Artificial Sequence
  Vb17_N33S VL CDR1
RSSQSLVHSSGNTYLH

SEQ ID NO: 677 - protein, 112 aa, Artificial Sequence
  Vb17_N33S VL
DIQMTQSPSSLSASVGDRVTITCRSSQSLVHSSGNTYLHWYQQKPGKAPKFLIYKVSNRFSGVPSRFSGSGSGTDFTLTISSLQPEDFATYYCSQSTHVPFTFGQGTKLEIK

SEQ ID NO: 678 - protein, 16 aa, Artificial Sequence
  Vb17_N33S VL CDR1 (Exemplary)
RSSQSLVHSSGNTYLH

SEQ ID NO: 679 - protein, 11 aa, Artificial Sequence
  Vb17_N33S VL CDR1 (IMGT)
QSLVHSSGNTY

SEQ ID NO: 680 - protein, 16 aa, Artificial Sequence
  Vb17_N33S VL CDR1 (Kabat)
RSSQSLVHSSGNTYLH

SEQ ID NO: 681 - protein, 12 aa, Artificial Sequence
  Vb17_N33S VL CDR1 (Chothia v.1)
SQSLVHSSGNTY

SEQ ID NO: 682 - protein, 4 aa, Artificial Sequence
  Vb17_N33S VH CDR2 (Chothia v.2)
SYDG

SEQ ID NO: 683 - protein, 10 aa, Artificial Sequence
  Vb17_N33S VH CDR3 (Chothia v.2)
PSPGTGYAVD

SEQ ID NO: 684 - protein, 12 aa, Artificial Sequence
  Vb17_N33S VL CDR1 (Chothia v.2)
SQSLVHSSGNTY

SEQ ID NO: 685 - protein, 12 aa, Artificial Sequence
  Vb17_N33S VL CDR1 (Contact)
VHSSGNTYLHWY

SEQ ID NO: 686 - protein, 16 aa, Artificial Sequence
  Vb17_N33S VL CDR1 (AbM)
RSSQSLVHSSGNTYLH

SEQ ID NO: 687 - protein, 5 aa, Artificial Sequence
  Vb17_N33S VH CDR2 (Chothia v.3)
SYDGS

SEQ ID NO: 688 - protein, 120 aa, Artificial Sequence
  B21M VH
QITLKESGPTLVKPTQTLTLTCTFSGFSLSTSGMGVSWIRQPPGKALEWLAHIYWDDDKRYNPSLKSRLTITKDTSKNQVVLTMTNMDPVDTATYYCARLYGFTYGFAYWGQGTLVTVSS

SEQ ID NO: 689 - protein, 119 aa, Artificial Sequence
  Null VH
EVQLLESGGGLVQPGGSLRLSCAASGFTFSSYAMSWVRQAPGKGLEWVSAISGSGGSTYYADSVKGRFTISRDNSKNTLYLQMNSLRAEDTAVYYCAKYDGIYGELDFWGCGTLVTVSS

SEQ ID NO: 690 - protein, 118 aa, Artificial Sequence
  C28B11 VH
EVQLLESGGGLGQPGGSLRLSCAASEFTFTSYAMSWVRQAPGKGLEWVSAISGSGGRTYYADSVKGRFTISRDNSKNTLYLQMNSLRAEDTAVYYCAKGAGYWYFDLWGRGTLVTVSS

SEQ ID NO: 691 - protein, 121 aa, Artificial Sequence
  C28B19 VH
QVQLQQPGSELVRPGASVKLSCKASGYTFTSYWMHWVKQRHGQGLEWIGNIYPGSGRTNYDEKFKSKGTLTVDTSSRTAYMHLSSLTSEDSAVYYCTREHYGSNSHPMDYWGQGTSVTVSS

SEQ ID NO: 692 - protein, 115 aa, Artificial Sequence
  C28B103 VH
QVQLQQWGAGLLKPSETLSLICAVYGGSFSGYYWSWIRQPPGKGLEWIGDINHSGNTNFNPSLKSRVTISVDTSKNQFSLKLSSVTAADTAVYYCAKGEAWFDPWGQGIMVTVSS

SEQ ID NO: 693 - protein, 115 aa, Artificial Sequence
  C28B105 VH
QVQLQQWGAGLLKPSETLSLTCAVYGGSFSGYYWNWIRQPPGKGLQWIGEINHSGTTNYNPSLKSRVTISVDTSKNQFSLKLSSLTAADTAVYYCARGEAVALYWGQGTLVTVSS

SEQ ID NO: 694 - protein, 111 aa, Artificial Sequence
  B21M VL
DIVMTQSPDSLAVSLGERATINCRASQSVDYNGISYMHWYQQKPGQPPKLLIYAASNPESGVPDRFSGSGSGTDFTLTISSLQAEDVAVYYCQQIIEDPWTFGQGTKVEIK

SEQ ID NO: 695 - protein, 107 aa, Artificial Sequence
  Null VL
DIQMTQSPSSLSASVGDRVTITCRASQSISSYLNWYQQKPGCAPKLLIYAASSLQSGVPSRFSGSGSGTDFTLTISSLQPEDFATYYCQQSYSTPLTFGQGTKVEIK

SEQ ID NO: 696 - protein, 107 aa, Artificial Sequence
  C28B11 VL
EIVLTQSPATLSLSPGERAILSCRASQSVSSYLAWYQQKPGQAPRLLIYDASNRATGIPARFSGSGSGTDFTLTISSLEPEDFAVYYCQQRSNWPLTFGGGTKVEIK

SEQ ID NO: 697 - protein, 107 aa, Artificial Sequence
  C28B19 VL
DIQMTQSPASLSASVGETVTITCGASENIYGSLNWYQRKQGKSPQLLIYGATNLADGMSSRFSGSGSGRQFSLKISSLHPDDVATYYCQNLLSTPYTFGGGTKLELK

SEQ ID NO: 698 - protein, 107 aa, Artificial Sequence
  C28B103 VL
EIVMTQSPATLSVSPGERATLSCRASQSVRSNLDWYQQKPGQAPRLLIYGASTRATGIPARFSGSGSGTEFTLTISSLQSEDFAVYYCQQYNNWPLTFGGGTKVEIK

SEQ ID NO: 699 - protein, 107 aa, Artificial Sequence
  C28B105 VL
EIVMTQSPATLSVSPGERATLSCRASQSVNSNLAWYQQKPGQAPRLLIYGASARATGIPARFSGSGSGTEFTLTISSLQSEDFAVYYCQQYYNWPLTFGGGTKVEIK

SEQ ID NO: 700 - protein, 12 aa, Artificial Sequence
  B21M HC CDR1 (AbM)
GFSLSTSGMGVS

SEQ ID NO: 701 - protein, 10 aa, Artificial Sequence
  Null HC CDR1 (AbM)
GFTFSSYAMS

SEQ ID NO: 702 - protein, 10 aa, Artificial Sequence
  C28B11 HC CDR1 (AbM)
EFTFTSYAMS

SEQ ID NO: 703 - protein, 10 aa, Artificial Sequence
  C28B19 HC CDR1 (AbM)
GYTFTSYWMH

SEQ ID NO: 704 - protein, 10 aa, Artificial Sequence
  C28B103 HC CDR1 (AbM)
GGSFSGYYWS

SEQ ID NO: 705 - protein, 10 aa, Artificial Sequence
  C28B105 HC CDR1 (AbM)
GGSFSGYYWN

SEQ ID NO: 706 - protein, 9 aa, Artificial Sequence
  B21M HC CDR2 (AbM)
HIYWDDDKR

SEQ ID NO: 707 - protein, 10 aa, Artificial Sequence
  Null HC CDR2 (AbM)
AISGSGGSTY

SEQ ID NO: 708 - protein, 10 aa, Artificial Sequence
  C28B11 HC CDR2 (AbM)
AISGSGGRTY

SEQ ID NO: 709 - protein, 10 aa, Artificial Sequence
  C28B19 HC CDR2 (AbM)
NIYPGSGRTN

SEQ ID NO: 710 - protein, 9 aa, Artificial Sequence
  C28B103 HC CDR2 (AbM)
DINHSGNTN

SEQ ID NO: 711 - protein, 9 aa, Artificial Sequence
  C28B105 HC CDR2 (AbM)
EINHSGTTN

SEQ ID NO: 712 - protein, 10 aa, Artificial Sequence
  B21M HC CDR3 (AbM)
LYGFTYGFAY

SEQ ID NO: 713 - protein, 10 aa, Artificial Sequence
  Null HC CDR3 (AbM)
YDGIYGELDF

SEQ ID NO: 714 - protein, 9 aa, Artificial Sequence
  C28B11 HC CDR3 (AbM)
GAGYWYFDL

SEQ ID NO: 715 - protein, 12 aa, Artificial Sequence
  C28B19 HC CDR3 (AbM)
EHYGSNSHPMDY

SEQ ID NO: 716 - protein, 7 aa, Artificial Sequence
  C28B103 HC CDR3 (AbM)
GEAWFDP

SEQ ID NO: 717 - protein, 7 aa, Artificial Sequence
  C28B105 HC CDR3 (AbM)
GEAVALY

SEQ ID NO: 718 - protein, 6 aa, Artificial Sequence
  B17B21 HC CDR1 (Kabat v.2)
SGYFWN

SEQ ID NO: 719 - protein, 7 aa, Artificial Sequence
  B21M HC CDR1 (Kabat)
TSGMGVS

SEQ ID NO: 720 - protein, 5 aa, Artificial Sequence
  Null HC CDR1 (Kabat)
SYAMS

SEQ ID NO: 721 - protein, 5 aa, Artificial Sequence
  C28B11 HC CDR1 (Kabat)
SYAMS

SEQ ID NO: 722 - protein, 5 aa, Artificial Sequence
  C28B19 HC CDR1 (Kabat)
SYWMH

SEQ ID NO: 723 - protein, 5 aa, Artificial Sequence
  C28B103 HC CDR1 (Kabat)
GYYWS

SEQ ID NO: 724 - protein, 5 aa, Artificial Sequence
  C28B105 HC CDR1 (Kabat)
GYYWN

SEQ ID NO: 725 - protein, 16 aa, Artificial Sequence
  B21M HC CDR2 (Kabat)
HIYWDDDKRYNPSLKS

SEQ ID NO: 726 - protein, 17 aa, Artificial Sequence
  Null HC CDR2 (Kabat)
AISGSGGSTYYADSVKG

SEQ ID NO: 727 - protein, 17 aa, Artificial Sequence
  C28B11 HC CDR2 (Kabat)
AISGSGGRTYYADSVKG

SEQ ID NO: 728 - protein, 17 aa, Artificial Sequence
  C28B19 HC CDR2 (Kabat)
NIYPGSGRTNYDEKFKS

SEQ ID NO: 729 - protein, 16 aa, Artificial Sequence
  C28B103 HC CDR2 (Kabat)
DINHSGNTNFNPSLKS

SEQ ID NO: 730 - protein, 16 aa, Artificial Sequence
  C28B105 HC CDR2 (Kabat)
EINHSGTTNYNPSLKS

SEQ ID NO: 731 - protein, 10 aa, Artificial Sequence
  B21M HC CDR3 (Kabat)
LYGFTYGFAY

SEQ ID NO: 732 - protein, 10 aa, Artificial Sequence
  Null HC CDR3 (Kabat)
YDGIYGELDF

SEQ ID NO: 733 - protein, 9 aa, Artificial Sequence
  C28B11 HC CDR3 (Kabat)
GAGYWYFDL

SEQ ID NO: 734 - protein, 12 aa, Artificial Sequence
  C28B19 HC CDR3 (Kabat)
EHYGSNSHPMDY

SEQ ID NO: 735 - protein, 7 aa, Artificial Sequence
  C28B103 HC CDR3 (Kabat)
GEAWFDP

SEQ ID NO: 736 - protein, 7 aa, Artificial Sequence
  C28B105 HC CDR3 (Kabat)
GEAVALY

SEQ ID NO: 737 - protein, 9 aa, Artificial Sequence
  B21M HC CDR1 (Chothia)
GFSLSTSGM

SEQ ID NO: 738 - protein, 7 aa, Artificial Sequence
  Null HC CDR1 (Chothia)
GFTFSSY

SEQ ID NO: 739 - protein, 7 aa, Artificial Sequence
  C28B11 HC CDR1 (Chothia)
EFTFTSY

SEQ ID NO: 740 - protein, 7 aa, Artificial Sequence
  C28B19 HC CDR1 (Chothia)
GYTFTSY

SEQ ID NO: 741 - protein, 7 aa, Artificial Sequence
  C28B103 HC CDR1 (Chothia)
GGSFSGY

SEQ ID NO: 742 - protein, 7 aa, Artificial Sequence
  C28B105 HC CDR1 (Chothia)
GGSFSGY

SEQ ID NO: 743 - protein, 6 aa, Artificial Sequence
  BCMB519 HC CDR2 (Chothia v.3)
SGSGGS

SEQ ID NO: 744 - protein, 5 aa, Artificial Sequence
  B21M HC CDR2 (Chothia)
YWDDD

SEQ ID NO: 745 - protein, 6 aa, Artificial Sequence
  Null HC CDR2 (Chothia)
SGSGGS

SEQ ID NO: 746 - protein, 6 aa, Artificial Sequence
  C28B11 HC CDR2 (Chothia)
SGSGGR

SEQ ID NO: 747 - protein, 6 aa, Artificial Sequence
  C28B19 HC CDR2 (Chothia)
YPGSGR

SEQ ID NO: 748 - protein, 5 aa, Artificial Sequence
  C28B103 HC CDR2 (Chothia)
NHSGN

SEQ ID NO: 749 - protein, 5 aa, Artificial Sequence
  C28B105 HC CDR2 (Chothia)
NHSGT

SEQ ID NO: 750 - protein, 9 aa, Artificial Sequence
  B21M HC CDR3 (Chothia)
LYGFTYGFA

SEQ ID NO: 751 - protein, 9 aa, Artificial Sequence
  Null HC CDR3 (Chothia)
YDGIYGELD

SEQ ID NO: 752 - protein, 8 aa, Artificial Sequence
  C28B11 HC CDR3 (Chothia)
GAGYWYFD

SEQ ID NO: 753 - protein, 11 aa, Artificial Sequence
  C28B19 HC CDR3 (Chothia)
EHYGSNSHPMD

SEQ ID NO: 754 - protein, 6 aa, Artificial Sequence
  C28B103 HC CDR3 (Chothia)
GEAWFD

SEQ ID NO: 755 - protein, 6 aa, Artificial Sequence
  C28B105 HC CDR3 (Chothia)
GEAVAL

SEQ ID NO: 756 - protein, 10 aa, Artificial Sequence
  B21M HC CDR1 (IMGT)
GFSLSTSGMG

SEQ ID NO: 757 - protein, 8 aa, Artificial Sequence
  Null HC CDR1 (IMGT)
GFTFSSYA

SEQ ID NO: 758 - protein, 8 aa, Artificial Sequence
  C28B11 HC CDR1 (IMGT)
EFTFTSYA

SEQ ID NO: 759 - protein, 8 aa, Artificial Sequence
  C28B19 HC CDR1 (IMGT)
GYTFTSYW

SEQ ID NO: 760 - protein, 8 aa, Artificial Sequence
  C28B103 HC CDR1 (IMGT)
GGSFSGYY

SEQ ID NO: 761 - protein, 8 aa, Artificial Sequence
  C28B105 HC CDR1 (IMGT)
GGSFSGYY

SEQ ID NO: 762 - protein, 7 aa, Artificial Sequence
  B21M HC CDR2 (IMGT)
IYWDDDK

SEQ ID NO: 763 - protein, 8 aa, Artificial Sequence
  Null HC CDR2 (IMGT)
ISGSGGST

SEQ ID NO: 764 - protein, 8 aa, Artificial Sequence
  C28B11 HC CDR2 (IMGT)
ISGSGGRT

SEQ ID NO: 765 - protein, 8 aa, Artificial Sequence
  C28B19 HC CDR2 (IMGT)
IYPGSGRT

SEQ ID NO: 766 - protein, 7 aa, Artificial Sequence
  C28B103 HC CDR2 (IMGT)
INHSGNT

SEQ ID NO: 767 - protein, 7 aa, Artificial Sequence
  C28B105 HC CDR2 (IMGT)
INHSGTT

SEQ ID NO: 768 - protein, 12 aa, Artificial Sequence
  B21M HC CDR3 (IMGT)
ARLYGFTYGFAY

SEQ ID NO: 769 - protein, 12 aa, Artificial Sequence
  Null HC CDR3 (IMGT)
AKYDGIYGELDF

SEQ ID NO: 770 - protein, 11 aa, Artificial Sequence
  C28B11 HC CDR3 (IMGT)
AKGAGYWYFDL

SEQ ID NO: 771 - protein, 14 aa, Artificial Sequence
  C28B19 HC CDR3 (IMGT)
TREHYGSNSHPMDY

SEQ ID NO: 772 - protein, 9 aa, Artificial Sequence
  C28B103 HC CDR3 (IMGT)
AKGEAWFDP

SEQ ID NO: 773 - protein, 9 aa, Artificial Sequence
  C28B105 HC CDR3 (IMGT)
ARGEAVALY

SEQ ID NO: 774 - protein, 8 aa, Artificial Sequence
  B21M HC CDR1 (Contact)
STSGMGVS

SEQ ID NO: 775 - protein, 6 aa, Artificial Sequence
  Null HC CDR1 (Contact)
SSYAMS

SEQ ID NO: 776 - protein, 6 aa, Artificial Sequence
  C28B11 HC CDR1 (Contact)
TSYAMS

SEQ ID NO: 777 - protein, 6 aa, Artificial Sequence
  C28B19 HC CDR1 (Contact)
TSYWMH

SEQ ID NO: 778 - protein, 6 aa, Artificial Sequence
  C28B103 HC CDR1 (Contact)
SGYYWS

SEQ ID NO: 779 - protein, 6 aa, Artificial Sequence
  C28B105 HC CDR1 (Contact)
SGYYWN

SEQ ID NO: 780 - protein, 12 aa, Artificial Sequence
  B21M HC CDR2 (Contact)
WLAHIYWDDDKR

SEQ ID NO: 781 - protein, 13 aa, Artificial Sequence
  Null HC CDR2 (Contact)
WVSAISGSGGSTY

SEQ ID NO: 782 - protein, 13 aa, Artificial Sequence
  C28B11 HC CDR2 (Contact)
WVSAISGSGGRTY

SEQ ID NO: 783 - protein, 13 aa, Artificial Sequence
  C28B19 HC CDR2 (Contact)
WIGNIYPGSGRTN

SEQ ID NO: 784 - protein, 12 aa, Artificial Sequence
  C28B103 HC CDR2 (Contact)
WIGDINHSGNTN

SEQ ID NO: 785 - protein, 12 aa, Artificial Sequence
  C28B105 HC CDR2 (Contact)
WIGEINHSGTTN

SEQ ID NO: 786 - protein, 11 aa, Artificial Sequence
  B21M HC CDR3 (Contact)
ARLYGFTYGFA

SEQ ID NO: 787 - protein, 11 aa, Artificial Sequence
  Null HC CDR3 (Contact)
AKYDGIYGELD

SEQ ID NO: 788 - protein, 10 aa, Artificial Sequence
  C28B11 HC CDR3 (Contact)
AKGAGYWYFD

SEQ ID NO: 789 - protein, 13 aa, Artificial Sequence
  C28B19 HC CDR3 (Contact)
TREHYGSNSHPMD

SEQ ID NO: 790 - protein, 8 aa, Artificial Sequence
  C28B103 HC CDR3 (Contact)
AKGEAWFD

SEQ ID NO: 791 - protein, 8 aa, Artificial Sequence
  C28B105 HC CDR3 (Contact)
ARGEAVAL

SEQ ID NO: 792 - protein, 15 aa, Artificial Sequence
  B21M LC CDR1 (AbM)
RASQSVDYNGISYMH

SEQ ID NO: 793 - protein, 11 aa, Artificial Sequence
  Null LC CDR1 (AbM)
RASQSISSYLN

SEQ ID NO: 794 - protein, 11 aa, Artificial Sequence
  C28B11 LC CDR1 (AbM)
RASQSVSSYLA

SEQ ID NO: 795 - protein, 11 aa, Artificial Sequence
  C28B19 LC CDR1 (AbM)
GASENIYGSLN

SEQ ID NO: 796 - protein, 11 aa, Artificial Sequence
  C28B103 LC CDR1 (AbM)
RASQSVRSNLD

SEQ ID NO: 797 - protein, 11 aa, Artificial Sequence
  C28B105 LC CDR1 (AbM)
RASQSVNSNLA

SEQ ID NO: 798 - protein, 7 aa, Artificial Sequence
  B21M LC CDR2 (AbM)
AASNPES

SEQ ID NO: 799 - protein, 7 aa, Artificial Sequence
  Null LC CDR2 (AbM)
AASSLQS

SEQ ID NO: 800 - protein, 7 aa, Artificial Sequence
  C28B11 LC CDR2 (AbM)
DASNRAT

SEQ ID NO: 801 - protein, 7 aa, Artificial Sequence
  C28B19 LC CDR2 (AbM)
GATNLAD

SEQ ID NO: 802 - protein, 7 aa, Artificial Sequence
  C28B103 LC CDR2 (AbM)
GASTRAT

SEQ ID NO: 803 - protein, 7 aa, Artificial Sequence
  C28B105 LC CDR2 (AbM)
GASARAT

SEQ ID NO: 804 - protein, 9 aa, Artificial Sequence
  B21M LC CDR3 (AbM)
QQIIEDPWT

SEQ ID NO: 805 - protein, 9 aa, Artificial Sequence
  Null LC CDR3 (AbM)
QQSYSTPLT

SEQ ID NO: 806 - protein, 9 aa, Artificial Sequence
  C28B11 LC CDR3 (AbM)
QQRSNWPLT

SEQ ID NO: 807 - protein, 9 aa, Artificial Sequence
  C28B19 LC CDR3 (AbM)
QNLLSTPYT

SEQ ID NO: 808 - protein, 9 aa, Artificial Sequence
  C28B103 LC CDR3 (AbM)
QQYNNWPLT

SEQ ID NO: 809 - protein, 9 aa, Artificial Sequence
  C28B105 LC CDR3 (AbM)
QQYYNWPLT

SEQ ID NO: 810 - protein, 15 aa, Artificial Sequence
  B21M LC CDR1 (Kabat)
RASQSVDYNGISYMH

SEQ ID NO: 811 - protein, 11 aa, Artificial Sequence
  Null LC CDR1 (Kabat)
RASQSISSYLN

SEQ ID NO: 812 - protein, 11 aa, Artificial Sequence
  C28B11 LC CDR1 (Kabat)
RASQSVSSYLA

SEQ ID NO: 813 - protein, 11 aa, Artificial Sequence
  C28B19 LC CDR1 (Kabat)
GASENIYGSLN

SEQ ID NO: 814 - protein, 11 aa, Artificial Sequence
  C28B103 LC CDR1 (Kabat)
RASQSVRSNLD

SEQ ID NO: 815 - protein, 11 aa, Artificial Sequence
  C28B105 LC CDR1 (Kabat)
RASQSVNSNLA

SEQ ID NO: 816 - protein, 7 aa, Artificial Sequence
  B21M LC CDR2 (Kabat)
AASNPES

SEQ ID NO: 817 - protein, 7 aa, Artificial Sequence
  Null LC CDR2 (Kabat)
AASSLQS

SEQ ID NO: 818 - protein, 7 aa, Artificial Sequence
  C28B11 LC CDR2 (Kabat)
DASNRAT

SEQ ID NO: 819 - protein, 7 aa, Artificial Sequence
  C28B19 LC CDR2 (Kabat)
GATNLAD

SEQ ID NO: 820 - protein, 7 aa, Artificial Sequence
  C28B103 LC CDR2 (Kabat)
GASTRAT

SEQ ID NO: 821 - protein, 7 aa, Artificial Sequence
  C28B105 LC CDR2 (Kabat)
GASARAT

SEQ ID NO: 822 - protein, 9 aa, Artificial Sequence
  B21M LC CDR3 (Kabat)
QQIIEDPWT

SEQ ID NO: 823 - protein, 9 aa, Artificial Sequence
  Null LC CDR3 (Kabat)
QQSYSTPLT

SEQ ID NO: 824 - protein, 9 aa, Artificial Sequence
  C28B11 LC CDR3 (Kabat)
QQRSNWPLT

SEQ ID NO: 825 - protein, 9 aa, Artificial Sequence
  C28B19 LC CDR3 (Kabat)
QNLLSTPYT

SEQ ID NO: 826 - protein, 9 aa, Artificial Sequence
  C28B103 LC CDR3 (Kabat)
QQYNNWPLT

SEQ ID NO: 827 - protein, 9 aa, Artificial Sequence
  C28B105 LC CDR3 (Kabat)
QQYYNWPLT

SEQ ID NO: 828 - protein, 11 aa, Artificial Sequence
  B21M LC CDR1 (Chothia)
SQSVDYNGISY

SEQ ID NO: 829 - protein, 7 aa, Artificial Sequence
  Null LC CDR1 (Chothia)
SQSISSY

SEQ ID NO: 830 - protein, 7 aa, Artificial Sequence
  C28B11 LC CDR1 (Chothia)
SQSVSSY

SEQ ID NO: 831 - protein, 7 aa, Artificial Sequence
  C28B19 LC CDR1 (Chothia)
SENIYGS

SEQ ID NO: 832 - protein, 7 aa, Artificial Sequence
  C28B103 LC CDR1 (Chothia)
SQSVRSN

SEQ ID NO: 833 - protein, 7 aa, Artificial Sequence
  C28B105 LC CDR1 (Chothia)
SQSVNSN

SEQ ID NO: 834 - protein, 3 aa, Artificial Sequence
  B21M LC CDR2 (Chothia)
AAS

SEQ ID NO: 835 - protein, 3 aa, Artificial Sequence
  Null LC CDR2 (Chothia)
AAS

SEQ ID NO: 836 - protein, 3 aa, Artificial Sequence
  C28B11 LC CDR2 (Chothia)
DAS

SEQ ID NO: 837 - protein, 3 aa, Artificial Sequence
  C28B19 LC CDR2 (Chothia)
GAT

SEQ ID NO: 838 - protein, 3 aa, Artificial Sequence
  C28B103 LC CDR2 (Chothia)
GAS

SEQ ID NO: 839 - protein, 3 aa, Artificial Sequence
  C28B105 LC CDR2 (Chothia)
GAS

SEQ ID NO: 840 - protein, 6 aa, Artificial Sequence
  B21M LC CDR3 (Chothia)
IIEDPW

SEQ ID NO: 841 - protein, 6 aa, Artificial Sequence
  Null LC CDR3 (Chothia)
SYSTPL

SEQ ID NO: 842 - protein, 6 aa, Artificial Sequence
  C28B11 LC CDR3 (Chothia)
RSNWPL

SEQ ID NO: 843 - protein, 6 aa, Artificial Sequence
  C28B19 LC CDR3 (Chothia)
LLSTPY

SEQ ID NO: 844 - protein, 6 aa, Artificial Sequence
  C28B103 LC CDR3 (Chothia)
YNNWPL

SEQ ID NO: 845 - protein, 6 aa, Artificial Sequence
  C28B105 LC CDR3 (Chothia)
YYNWPL

SEQ ID NO: 846 - protein, 10 aa, Artificial Sequence
  B21M LC CDR1 (IMGT)
QSVDYNGISY

SEQ ID NO: 847 - protein, 6 aa, Artificial Sequence
  Null LC CDR1 (IMGT)
QSISSY

SEQ ID NO: 848 - protein, 6 aa, Artificial Sequence
  C28B11 LC CDR1 (IMGT)
QSVSSY

SEQ ID NO: 849 - protein, 6 aa, Artificial Sequence
  C28B19 LC CDR1 (IMGT)
ENIYGS

SEQ ID NO: 850 - protein, 6 aa, Artificial Sequence
  C28B103 LC CDR1 (IMGT)
QSVRSN

SEQ ID NO: 851 - protein, 6 aa, Artificial Sequence
  C28B105 LC CDR1 (IMGT)
QSVNSN

SEQ ID NO: 852 - protein, 3 aa, Artificial Sequence
  B21M LC CDR2 (IMGT)
AAS

SEQ ID NO: 853 - protein, 3 aa, Artificial Sequence
  Null LC CDR2 (IMGT)
AAS

SEQ ID NO: 854 - protein, 3 aa, Artificial Sequence
  C28B11 LC CDR2 (IMGT)
DAS

SEQ ID NO: 855 - protein, 3 aa, Artificial Sequence
  C28B19 LC CDR2 (IMGT)
GAT

SEQ ID NO: 856 - protein, 3 aa, Artificial Sequence
  C28B103 LC CDR2 (IMGT)
GAS

SEQ ID NO: 857 - protein, 3 aa, Artificial Sequence
  C28B105 LC CDR2 (IMGT)
GAS

SEQ ID NO: 858 - protein, 9 aa, Artificial Sequence
  B21M LC CDR3 (IMGT)
QQIIEDPWT

SEQ ID NO: 859 - protein, 9 aa, Artificial Sequence
  Null LC CDR3 (IMGT)
QQSYSTPLT

SEQ ID NO: 860 - protein, 9 aa, Artificial Sequence
  C28B11 LC CDR3 (IMGT)
QQRSNWPLT

SEQ ID NO: 861 - protein, 9 aa, Artificial Sequence
  C28B19 LC CDR3 (IMGT)
QNLLSTPYT

SEQ ID NO: 862 - protein, 9 aa, Artificial Sequence
  C28B103 LC CDR3 (IMGT)
QQYNNWPLT

SEQ ID NO: 863 - protein, 9 aa, Artificial Sequence
  C28B105 LC CDR3 (IMGT)
QQYYNWPLT

SEQ ID NO: 864 - protein, 11 aa, Artificial Sequence
  B21M LC CDR1 (Contact)
DYNGISYMHWY

SEQ ID NO: 865 - protein, 7 aa, Artificial Sequence
  Null LC CDR1 (Contact)
SSYLNWY

SEQ ID NO: 866 - protein, 7 aa, Artificial Sequence
  C28B11 LC CDR1 (Contact)
SSYLAWY

SEQ ID NO: 867 - protein, 7 aa, Artificial Sequence
  C28B19 LC CDR1 (Contact)
YGSLNWY

SEQ ID NO: 868 - protein, 7 aa, Artificial Sequence
  C28B103 LC CDR1 (Contact)
RSNLDWY

SEQ ID NO: 869 - protein, 7 aa, Artificial Sequence
  C28B105 LC CDR1 (Contact)
NSNLAWY

SEQ ID NO: 870 - protein, 10 aa, Artificial Sequence
  B21M LC CDR2 (Contact)
LLIYAASNPE

SEQ ID NO: 871 - protein, 10 aa, Artificial Sequence
  Null LC CDR2 (Contact)
LLIYAASSLQ

SEQ ID NO: 872 - protein, 10 aa, Artificial Sequence
  C28B11 LC CDR2 (Contact)
LLIYDASNRA

SEQ ID NO: 873 - protein, 10 aa, Artificial Sequence
  C28B19 LC CDR2 (Contact)
LLIYGATNLA

SEQ ID NO: 874 - protein, 10 aa, Artificial Sequence
  C28B103 LC CDR2 (Contact)
LLIYGASTRA

SEQ ID NO: 875 - protein, 10 aa, Artificial Sequence
  C28B105 LC CDR2 (Contact)
LLIYGASARA

SEQ ID NO: 876 - protein, 8 aa, Artificial Sequence
  B21M LC CDR3 (Contact)
QQIIEDPW

SEQ ID NO: 877 - protein, 8 aa, Artificial Sequence
  Null LC CDR3 (Contact)
QQSYSTPL

SEQ ID NO: 878 - protein, 8 aa, Artificial Sequence
  C28B11 LC CDR3 (Contact)
QQRSNWPL

SEQ ID NO: 879 - protein, 8 aa, Artificial Sequence
  C28B19 LC CDR3 (Contact)
QNLLSTPY

SEQ ID NO: 880 - protein, 8 aa, Artificial Sequence
  C28B103 LC CDR3 (Contact)
QQYNNWPL

SEQ ID NO: 881 - protein, 8 aa, Artificial Sequence
  C28B105 LC CDR3 (Contact)
QQYYNWPL

SEQ ID NO: 882 - protein, 720 aa, Artificial Sequence
  C28B11 x B17B21 x BCMB519 Heavy Chain 1
EVQLLESGGGLGQPGGSLRLSCAASEFTFTSYAMSWVRQAPGKGLEWVSAISGSGGRTYYADSVKGRFTISRDNSKNTLYLQMNSLRAEDTAVYYCAKGGAGYWYFDLWGRGTLVTVSSASTKGPSVFPLAPSSKSTSGGTAALGCLVKDYFPEPVTVSWNSGALTSGVHTFPAVLQSSGLYSLSSVVTVPSSSLGTQTYICNVNHKPSNTKVDKKVEPKSCDKTHTCPPCPAPEAAGGPSVFLFPPKPKDTLMISRTPEVTCVVVSVSHEDPEVKFNWYVDGVEVHNAKTKPREEQYNSTYRVVSVLTVLHQDWLNGKEYKCKVSNKALPAPIEKTISKAKGQPREPQVYTLPPSREEMTKNQVSLWCLVKGFYPSDIAVEWESNGQPENNYKTTPPVLDSDGSFFLYSKLTVDKSRWQQGNVFSCSVMHEALHNHYTQKSLSLSPGGGSEGKSSGSGSESKSTGGSDIQMTQSPSSLSASVGDRVTITCRSSQSLVHSSGNTYLHWYQQKPGKAPKFLIYKVSNRFSGVPSRFSGSGSGTDFTLTISSLQPEDFATYYCSQSTHVPFTFGQGTKLEIKGGSEGKSSGSGSESKSTGGSQVQLQESGPGLVKPSETLSLTCTVSGYSITSGYFWNWIRQPPGKGLEWIGYISYDGSNNYNPSLKSRVTISRDTSKNQFSLKLSSVTAADTAVYYCASPSPGTGYAVDYWGQGTLVTVSS

SEQ ID NO: 883 - protein, 722 aa, Artificial Sequence
  C28B19 x B17B21 x BCMB519 Heavy Chain 1
QVQLQQPGSELVRPGASVKLSCKASGYTFTSYWMHWVKQRHGQGLEWIGNIYPGSGRTNYDEKFKSKGTLTVDTSSRTAYMHLSSLTSEDSAVYYCTREHYGSNSHPMDYWGQGTSVTVSSASTKGPSVFPLAPSSKSTSGGTAALGCLVKDYFPEPVTVSWNSGALTSGVHTFPAVLQSSGLYSLSSVVTVPSSSLGTQTYICNVNHKPSNTKVDKKVEPKSCDKTHTCPPCPAPEAAGGPSVFLFPPKPKDTLMISRTPEVTCVVVSVSHEDPEVKFNWYVDGVEVHNAKTKPREEQYNSTYRVVSVLTVLHQDWLNGKEYKCKVSNKALPAPIEKTISKAKGQPREPQVYTLPPSREEMTKNQVSLWCLVKGFYPSDIAVEWESNGQPENNYKTTPPVLDSDGSFFLYSKLTVDKSRWQQGNVFSCSVMHEALHNHYTQKSLSLSPGGGSEGKSSGSGSESKSTGGSDIQMTQSPSSLSASVGDRVTITCRSSQSLVHSSGNTYLHWYQQKPGKAPKFLIYKVSNRFSGVPSRFSGSGSGTDFTLTISSLQPEDFATYYCSQSTHVPFTFGQGTKLEIKGGSEGKSSGSGSESKSTGGSQVQLQESGPGLVKPSETLSLTCTVSGYSITSGYFWNWIRQPPGKGLEWIGYISYDGSNNYNPSLKSRVTISRDTSKNQFSLKLSSVTAADTAVYYCASPSPGTGYAVDYWGQGTLVTVSS

SEQ ID NO: 884 - protein, 716 aa, Artificial Sequence
  C28B103 x B17B21 x BCMB519 Heavy Chain 1
QVQLQQWGAGLLKPSETLSLICAVYGGSFSGYYWSWIRQPPGKGLEWIGDINHSGNTNFNPSLKSRVTISVDTSKNQFSLKLSSVTAADTAVYYCAKGEAWFDPWGQGIMVTVSSASTKGPSVFPLAPSSKSTSGGTAALGCLVKDYFPEPVTVSWNSGALTSGVHTFPAVLQSSGLYSLSSVVTVPSSSLGTQTYICNVNHKPSNTKVDKKVEPKSCDKTHTCPPCPAPEAAGGPSVFLFPPKPKDTLMISRTPEVTCVVVSVSHEDPEVKFNWYVDGVEVHNAKTKPREEQYNSTYRVVSVLTVLHQDWLNGKEYKCKVSNKALPAPIEKTISKAKGQPREPQVYTLPPSREEMTKNQVSLWCLVKGFYPSDIAVEWESNGQPENNYKTTPPVLDSDGSFFLYSKLTVDKSRWQQGNVFSCSVMHEALHNHYTQKSLSLSPGGGSEGKSSGSGSESKSTGGSDIQMTQSPSSLSASVGDRVTITCRSSQSLVHSSGNTYLHWYQQKPGKAPKFLIYKVSNRFSGVPSRFSGSGSGTDFTLTISSLQPEDFATYYCSQSTHVPFTFGQGTKLEIKGGSEGKSSGSGSESKSTGGSQVQLQESGPGLVKPSETLSLTCTVSGYSITSGYFWNWIRQPPGKGLEWIGYISYDGSNNYNPSLKSRVTISRDTSKNQFSLKLSSVTAADTAVYYCASPSPGTGYAVDYWGQGTLVTVSS

SEQ ID NO: 885 - protein, 716 aa, Artificial Sequence
  C28B105 x B17B21 x BCMB519 Heavy Chain 1
QVQLQQWGAGLLKPSETLSLTCAVYGGSFSGYYWNWIRQPPGKGLQWIGEINHSGTTNYNPSLKSRVTISVDTSKNQFSLKLSSLTAADTAVYYCARGEAVALYWGQGTLVTVSSASTKGPSVFPLAPSSKSTSGGTAALGCLVKDYFPEPVTVSWNSGALTSGVHTFPAVLQSSGLYSLSSVVTVPSSSLGTQTYICNVNHKPSNTKVDKKVEPKSCDKTHTCPPCPAPEAAGGPSVFLFPPKPKDTLMISRTPEVTCVVVSVSHEDPEVKFNWYVDGVEVHNAKTKPREEQYNSTYRVVSVLTVLHQDWLNGKEYKCKVSNKALPAPIEKTISKAKGQPREPQVYTLPPSREEMTKNQVSLWCLVKGFYPSDIAVEWESNGQPENNYKTTPPVLDSDGSFFLYSKLTVDKSRWQQGNVFSCSVMHEALHNHYTQKSLSLSPGGGSEGKSSGSGSESKSTGGSDIQMTQSPSSLSASVGDRVTITCRSSQSLVHSSGNTYLHWYQQKPGKAPKFLIYKVSNRFSGVPSRFSGSGSGTDFTLTISSLQPEDFATYYCSQSTHVPFTFGQGTKLEIKGGSEGKSSGSGSESKSTGGSQVQLQESGPGLVKPSETLSLTCTVSGYSITSGYFWNWIRQPPGKGLEWIGYISYDGSNNYNPSLKSRVTISRDTSKNQFSLKLSSVTAADTAVYYCASPSPGTGYAVDYWGQGTLVTVSS

SEQ ID NO: 886 - protein, 721 aa, Artificial Sequence
  B21M x B17B21 x BCMB519 Heavy Chain 1
QITLKESGPTLVKPTQTLTLTCTFSGFSLSTSGMGVSWIRQPPGKALEWLAHIYWDDDKRYNPSLKSRLTITKDTSKNQVVLTMTNMDPVDTATYYCARLYGFTYGFAYWGQGTLVTVSSASTKGPSVFPLAPSSKSTSGGTAALGCLVKDYFPEPVTVSWNSGALTSGVHTFPAVLQSSGLYSLSSVVTVPSSSLGTQTYICNVNHKPSNTKVDKKVEPKSCDKTHTCPPCPAPEAAGGPSVFLFPPKPKDTLMISRTPEVTCVVVSVSHEDPEVKFNWYVDGVEVHNAKTKPREEQYNSTYRVVSVLTVLHQDWLNGKEYKCKVSNKALPAPIEKTISKAKGQPREPQVYTLPPSREEMTKNQVSLWCLVKGFYPSDIAVEWESNGQPENNYKTTPPVLDSDGSFFLYSKLTVDKSRWQQGNVFSCSVMHEALHNHYTQKSLSLSPGGGSEGKSSGSGSESKSTGGSDIQMTQSPSSLSASVGDRVTITCRSSQSLVHSSGNTYLHWYQQKPGKAPKFLIYKVSNRFSGVPSRFSGSGSGTDFTLTISSLQPEDFATYYCSQSTHVPFTFGQGTKLEIKGGSEGKSSGSGSESKSTGGSQVQLQESGPGLVKPSETLSLTCTVSGYSITSGYFWNWIRQPPGKGLEWIGYISYDGSNNYNPSLKSRVTISRDTSKNQFSLKLSSVTAADTAVYYCASPSPGTGYAVDYWGQGTLVTVSS

SEQ ID NO: 887 - protein, 712 aa, Artificial Sequence
  C28B11 x Null x BCMB519 Heavy Chain 1
EVQLLESGGGLGQPGGSLRLSCAASEFTFTSYAMSWVRQAPGKGLEWVSAISGSGGRTYYADSVKGRFTISRDNSKNTLYLQMNSLRAEDTAVYYCAKGGAGYWYFDLWGRGTLVTVSSASTKGPSVFPLAPSSKSTSGGTAALGCLVKDYFPEPVTVSWNSGALTSGVHTFPAVLQSSGLYSLSSVVTVPSSSLGTQTYICNVNHKPSNTKVDKKVEPKSCDKTHTCPPCPAPEAAGGPSVFLFPPKPKDTLMISRTPEVTCVVVSVSHEDPEVKFNWYVDGVEVHNAKTKPREEQYNSTYRVVSVLTVLHQDWLNGKEYKCKVSNKALPAPIEKTISKAKGQPREPQVYTLPPSREEMTKNQVSLWCLVKGFYPSDIAVEWESNGQPENNYKTTPPVLDSDGSFFLYSKLTVDKSRWQQGNVFSCSVMHEALHNHYTQKSLSLSPGGGSEGKSSGSGSESKSTGGSDIQMTQSPSSLSASVGDRVTITCRASQSISSYLNWYQQKPGCAPKLLIYAASSLQSGVPSRFSGSGSGTDFTLTISSLQPEDFATYYCQQSYSTPLTFGQGTKVEIKGGGSGGSGGCPPCGGSGGEVQLLESGGGLVQPGGSLRLSCAASGFTFSSYAMSWVRQAPGKGLEWVSAISGSGGSTYYADSVKGRFTISRDNSKNTLYLQMNSLRAEDTAVYYCAKYDGIYGELDFWGCGTLVTVSS

SEQ ID NO: 888 - protein, 714 aa, Artificial Sequence
  C28B19 x Null x BCMB519 Heavy Chain 1
QVQLQQPGSELVRPGASVKLSCKASGYTFTSYWMHWVKQRHGQGLEWIGNIYPGSGRTNYDEKFKSKGTLTVDTSSRTAYMHLSSLTSEDSAVYYCTREHYGSNSHPMDYWGQGTSVTVSSASTKGPSVFPLAPSSKSTSGGTAALGCLVKDYFPEPVTVSWNSGALTSGVHTFPAVLQSSGLYSLSSVVTVPSSSLGTQTYICNVNHKPSNTKVDKKVEPKSCDKTHTCPPCPAPEAAGGPSVFLFPPKPKDTLMISRTPEVTCVVVSVSHEDPEVKFNWYVDGVEVHNAKTKPREEQYNSTYRVVSVLTVLHQDWLNGKEYKCKVSNKALPAPIEKTISKAKGQPREPQVYTLPPSREEMTKNQVSLWCLVKGFYPSDIAVEWESNGQPENNYKTTPPVLDSDGSFFLYSKLTVDKSRWQQGNVFSCSVMHEALHNHYTQKSLSLSPGGGSEGKSSGSGSESKSTGGSDIQMTQSPSSLSASVGDRVTITCRASQSISSYLNWYQQKPGCAPKLLIYAASSLQSGVPSRFSGSGSGTDFTLTISSLQPEDFATYYCQQSYSTPLTFGQGTKVEIKGGGSGGSGGCPPCGGSGGEVQLLESGGGLVQPGGSLRLSCAASGFTFSSYAMSWVRQAPGKGLEWVSAISGSGGSTYYADSVKGRFTISRDNSKNTLYLQMNSLRAEDTAVYYCAKYDGIYGELDFWGCGTLVTVSS

SEQ ID NO: 889 - protein, 708 aa, Artificial Sequence
  C28B103 x Null x BCMB519 Heavy Chain 1
QVQLQQWGAGLLKPSETLSLICAVYGGSFSGYYWSWIRQPPGKGLEWIGDINHSGNTNFNPSLKSRVTISVDTSKNQFSLKLSSVTAADTAVYYCAKGEAWFDPWGQGIMVTVSSASTKGPSVFPLAPSSKSTSGGTAALGCLVKDYFPEPVTVSWNSGALTSGVHTFPAVLQSSGLYSLSSVVTVPSSSLGTQTYICNVNHKPSNTKVDKKVEPKSCDKTHTCPPCPAPEAAGGPSVFLFPPKPKDTLMISRTPEVTCVVVSVSHEDPEVKFNWYVDGVEVHNAKTKPREEQYNSTYRVVSVLTVLHQDWLNGKEYKCKVSNKALPAPIEKTISKAKGQPREPQVYTLPPSREEMTKNQVSLWCLVKGFYPSDIAVEWESNGQPENNYKTTPPVLDSDGSFFLYSKLTVDKSRWQQGNVFSCSVMHEALHNHYTQKSLSLSPGGGSEGKSSGSGSESKSTGGSDIQMTQSPSSLSASVGDRVTITCRASQSISSYLNWYQQKPGCAPKLLIYAASSLQSGVPSRFSGSGSGTDFTLTISSLQPEDFATYYCQQSYSTPLTFGQGTKVEIKGGGSGGSGGCPPCGGSGGEVQLLESGGGLVQPGGSLRLSCAASGFTFSSYAMSWVRQAPGKGLEWVSAISGSGGSTYYADSVKGRFTISRDNSKNTLYLQMNSLRAEDTAVYYCAKYDGIYGELDFWGCGTLVTVSS

SEQ ID NO: 890 - protein, 708 aa, Artificial Sequence
  C28B105 x Null x BCMB519 Heavy Chain 1
QVQLQQWGAGLLKPSETLSLTCAVYGGSFSGYYWNWIRQPPGKGLQWIGEINHSGTTNYNPSLKSRVTISVDTSKNQFSLKLSSLTAADTAVYYCARGEAVALYWGQGTLVTVSSASTKGPSVFPLAPSSKSTSGGTAALGCLVKDYFPEPVTVSWNSGALTSGVHTFPAVLQSSGLYSLSSVVTVPSSSLGTQTYICNVNHKPSNTKVDKKVEPKSCDKTHTCPPCPAPEAAGGPSVFLFPPKPKDTLMISRTPEVTCVVVSVSHEDPEVKFNWYVDGVEVHNAKTKPREEQYNSTYRVVSVLTVLHQDWLNGKEYKCKVSNKALPAPIEKTISKAKGQPREPQVYTLPPSREEMTKNQVSLWCLVKGFYPSDIAVEWESNGQPENNYKTTPPVLDSDGSFFLYSKLTVDKSRWQQGNVFSCSVMHEALHNHYTQKSLSLSPGGGSEGKSSGSGSESKSTGGSDIQMTQSPSSLSASVGDRVTITCRASQSISSYLNWYQQKPGCAPKLLIYAASSLQSGVPSRFSGSGSGTDFTLTISSLQPEDFATYYCQQSYSTPLTFGQGTKVEIKGGGSGGSGGCPPCGGSGGEVQLLESGGGLVQPGGSLRLSCAASGFTFSSYAMSWVRQAPGKGLEWVSAISGSGGSTYYADSVKGRFTISRDNSKNTLYLQMNSLRAEDTAVYYCAKYDGIYGELDFWGCGTLVTVSS

SEQ ID NO: 891 - protein, 713 aa, Artificial Sequence
  B21M x Null x BCMB519 Heavy Chain 1
QITLKESGPTLVKPTQTLTLTCTFSGFSLSTSGMGVSWIRQPPGKALEWLAHIYWDDDKRYNPSLKSRLTITKDTSKNQVVLTMTNMDPVDTATYYCARLYGFTYGFAYWGQGTLVTVSSASTKGPSVFPLAPSSKSTSGGTAALGCLVKDYFPEPVTVSWNSGALTSGVHTFPAVLQSSGLYSLSSVVTVPSSSLGTQTYICNVNHKPSNTKVDKKVEPKSCDKTHTCPPCPAPEAAGGPSVFLFPPKPKDTLMISRTPEVTCVVVSVSHEDPEVKFNWYVDGVEVHNAKTKPREEQYNSTYRVVSVLTVLHQDWLNGKEYKCKVSNKALPAPIEKTISKAKGQPREPQVYTLPPSREEMTKNQVSLWCLVKGFYPSDIAVEWESNGQPENNYKTTPPVLDSDGSFFLYSKLTVDKSRWQQGNVFSCSVMHEALHNHYTQKSLSLSPGGGSEGKSSGSGSESKSTGGSDIQMTQSPSSLSASVGDRVTITCRASQSISSYLNWYQQKPGCAPKLLIYAASSLQSGVPSRFSGSGSGTDFTLTISSLQPEDFATYYCQQSYSTPLTFGQGTKVEIKGGGSGGSGGCPPCGGSGGEVQLLESGGGLVQPGGSLRLSCAASGFTFSSYAMSWVRQAPGKGLEWVSAISGSGGSTYYADSVKGRFTISRDNSKNTLYLQMNSLRAEDTAVYYCAKYDGIYGELDFWGCGTLVTVSS

SEQ ID NO: 892 - protein, 739 aa, Artificial Sequence
  C28B11 x B17B21 x BCMB519 Heavy Chain 1 (Primary Transcript)
MAWVWTLLFLMAAAQSIQAEVQLLESGGGLGQPGGSLRLSCAASEFTFTSYAMSWVRQAPGKGLEWVSAISGSGGRTYYADSVKGRFTISRDNSKNTLYLQMNSLRAEDTAVYYCAKGGAGYWYFDLWGRGTLVTVSSASTKGPSVFPLAPSSKSTSGGTAALGCLVKDYFPEPVTVSWNSGALTSGVHTFPAVLQSSGLYSLSSVVTVPSSSLGTQTYICNVNHKPSNTKVDKKVEPKSCDKTHTCPPCPAPEAAGGPSVFLFPPKPKDTLMISRTPEVTCVVVSVSHEDPEVKFNWYVDGVEVHNAKTKPREEQYNSTYRVVSVLTVLHQDWLNGKEYKCKVSNKALPAPIEKTISKAKGQPREPQVYTLPPSREEMTKNQVSLWCLVKGFYPSDIAVEWESNGQPENNYKTTPPVLDSDGSFFLYSKLTVDKSRWQQGNVFSCSVMHEALHNHYTQKSLSLSPGGGSEGKSSGSGSESKSTGGSDIQMTQSPSSLSASVGDRVTITCRSSQSLVHSSGNTYLHWYQQKPGKAPKFLIYKVSNRFSGVPSRFSGSGSGTDFTLTISSLQPEDFATYYCSQSTHVPFTFGQGTKLEIKGGSEGKSSGSGSESKSTGGSQVQLQESGPGLVKPSETLSLTCTVSGYSITSGYFWNWIRQPPGKGLEWIGYISYDGSNNYNPSLKSRVTISRDTSKNQFSLKLSSVTAADTAVYYCASPSPGTGYAVDYWGQGTLVTVSS

SEQ ID NO: 893 - protein, 741 aa, Artificial Sequence
  C28B19 x B17B21 x BCMB519 Heavy Chain 1 (Primary Transcript)
MAWVWTLLFLMAAAQSIQAQVQLQQPGSELVRPGASVKLSCKASGYTFTSYWMHWVKQRHGQGLEWIGNIYPGSGRTNYDEKFKSKGTLTVDTSSRTAYMHLSSLTSEDSAVYYCTREHYGSNSHPMDYWGQGTSVTVSSASTKGPSVFPLAPSSKSTSGGTAALGCLVKDYFPEPVTVSWNSGALTSGVHTFPAVLQSSGLYSLSSVVTVPSSSLGTQTYICNVNHKPSNTKVDKKVEPKSCDKTHTCPPCPAPEAAGGPSVFLFPPKPKDTLMISRTPEVTCVVVSVSHEDPEVKFNWYVDGVEVHNAKTKPREEQYNSTYRVVSVLTVLHQDWLNGKEYKCKVSNKALPAPIEKTISKAKGQPREPQVYTLPPSREEMTKNQVSLWCLVKGFYPSDIAVEWESNGQPENNYKTTPPVLDSDGSFFLYSKLTVDKSRWQQGNVFSCSVMHEALHNHYTQKSLSLSPGGGSEGKSSGSGSESKSTGGSDIQMTQSPSSLSASVGDRVTITCRSSQSLVHSSGNTYLHWYQQKPGKAPKFLIYKVSNRFSGVPSRFSGSGSGTDFTLTISSLQPEDFATYYCSQSTHVPFTFGQGTKLEIKGGSEGKSSGSGSESKSTGGSQVQLQESGPGLVKPSETLSLTCTVSGYSITSGYFWNWIRQPPGKGLEWIGYISYDGSNNYNPSLKSRVTISRDTSKNQFSLKLSSVTAADTAVYYCASPSPGTGYAVDYWGQGTLVTVSS

SEQ ID NO: 894 - protein, 735 aa, Artificial Sequence
  C28B103 x B17B21 x BCMB519 Heavy Chain 1 (Primary Transcript)
MAWVWTLLFLMAAAQSIQAQVQLQQWGAGLLKPSETLSLICAVYGGSFSGYYWSWIRQPPGKGLEWIGDINHSGNTNFNPSLKSRVTISVDTSKNQFSLKLSSVTAADTAVYYCAKGEAWFDPWGQGIMVTVSSASTKGPSVFPLAPSSKSTSGGTAALGCLVKDYFPEPVTVSWNSGALTSGVHTFPAVLQSSGLYSLSSVVTVPSSSLGTQTYICNVNHKPSNTKVDKKVEPKSCDKTHTCPPCPAPEAAGGPSVFLFPPKPKDTLMISRTPEVTCVVVSVSHEDPEVKFNWYVDGVEVHNAKTKPREEQYNSTYRVVSVLTVLHQDWLNGKEYKCKVSNKALPAPIEKTISKAKGQPREPQVYTLPPSREEMTKNQVSLWCLVKGFYPSDIAVEWESNGQPENNYKTTPPVLDSDGSFFLYSKLTVDKSRWQQGNVFSCSVMHEALHNHYTQKSLSLSPGGGSEGKSSGSGSESKSTGGSDIQMTQSPSSLSASVGDRVTITCRSSQSLVHSSGNTYLHWYQQKPGKAPKFLIYKVSNRFSGVPSRFSGSGSGTDFTLTISSLQPEDFATYYCSQSTHVPFTFGQGTKLEIKGGSEGKSSGSGSESKSTGGSQVQLQESGPGLVKPSETLSLTCTVSGYSITSGYFWNWIRQPPGKGLEWIGYISYDGSNNYNPSLKSRVTISRDTSKNQFSLKLSSVTAADTAVYYCASPSPGTGYAVDYWGQGTLVTVSS

SEQ ID NO: 895 - protein, 735 aa, Artificial Sequence
  C28B105 x B17B21 x BCMB519 Heavy Chain 1 (Primary Transcript)
MAWVWTLLFLMAAAQSIQAQVQLQQWGAGLLKPSETLSLTCAVYGGSFSGYYWNWIRQPPGKGLQWIGEINHSGTTNYNPSLKSRVTISVDTSKNQFSLKLSSLTAADTAVYYCARGEAVALYWGQGTLVTVSSASTKGPSVFPLAPSSKSTSGGTAALGCLVKDYFPEPVTVSWNSGALTSGVHTFPAVLQSSGLYSLSSVVTVPSSSLGTQTYICNVNHKPSNTKVDKKVEPKSCDKTHTCPPCPAPEAAGGPSVFLFPPKPKDTLMISRTPEVTCVVVSVSHEDPEVKFNWYVDGVEVHNAKTKPREEQYNSTYRVVSVLTVLHQDWLNGKEYKCKVSNKALPAPIEKTISKAKGQPREPQVYTLPPSREEMTKNQVSLWCLVKGFYPSDIAVEWESNGQPENNYKTTPPVLDSDGSFFLYSKLTVDKSRWQQGNVFSCSVMHEALHNHYTQKSLSLSPGGGSEGKSSGSGSESKSTGGSDIQMTQSPSSLSASVGDRVTITCRSSQSLVHSSGNTYLHWYQQKPGKAPKFLIYKVSNRFSGVPSRFSGSGSGTDFTLTISSLQPEDFATYYCSQSTHVPFTFGQGTKLEIKGGSEGKSSGSGSESKSTGGSQVQLQESGPGLVKPSETLSLTCTVSGYSITSGYFWNWIRQPPGKGLEWIGYISYDGSNNYNPSLKSRVTISRDTSKNQFSLKLSSVTAADTAVYYCASPSPGTGYAVDYWGQGTLVTVSS

SEQ ID NO: 896 - protein, 740 aa, Artificial Sequence
  B21M x B17B21 x BCMB519 Heavy Chain 1 (Primary Transcript)
MAWVWTLLFLMAAAQSIQAQITLKESGPTLVKPTQTLTLTCTFSGFSLSTSGMGVSWIRQPPGKALEWLAHIYWDDDKRYNPSLKSRLTITKDTSKNQVVLTMTNMDPVDTATYYCARLYGFTYGFAYWGQGTLVTVSSASTKGPSVFPLAPSSKSTSGGTAALGCLVKDYFPEPVTVSWNSGALTSGVHTFPAVLQSSGLYSLSSVVTVPSSSLGTQTYICNVNHKPSNTKVDKKVEPKSCDKTHTCPPCPAPEAAGGPSVFLFPPKPKDTLMISRTPEVTCVVVSVSHEDPEVKFNWYVDGVEVHNAKTKPREEQYNSTYRVVSVLTVLHQDWLNGKEYKCKVSNKALPAPIEKTISKAKGQPREPQVYTLPPSREEMTKNQVSLWCLVKGFYPSDIAVEWESNGQPENNYKTTPPVLDSDGSFFLYSKLTVDKSRWQQGNVFSCSVMHEALHNHYTQKSLSLSPGGGSEGKSSGSGSESKSTGGSDIQMTQSPSSLSASVGDRVTITCRSSQSLVHSSGNTYLHWYQQKPGKAPKFLIYKVSNRFSGVPSRFSGSGSGTDFTLTISSLQPEDFATYYCSQSTHVPFTFGQGTKLEIKGGSEGKSSGSGSESKSTGGSQVQLQESGPGLVKPSETLSLTCTVSGYSITSGYFWNWIRQPPGKGLEWIGYISYDGSNNYNPSLKSRVTISRDTSKNQFSLKLSSVTAADTAVYYCASPSPGTGYAVDYWGQGTLVTVSS

SEQ ID NO: 897 - protein, 731 aa, Artificial Sequence
  C28B11 x Null x BCMB519 Heavy Chain 1 (Primary Transcript)
MAWVWTLLFLMAAAQSIQAEVQLLESGGGLGQPGGSLRLSCAASEFTFTSYAMSWVRQAPGKGLEWVSAISGSGGRTYYADSVKGRFTISRDNSKNTLYLQMNSLRAEDTAVYYCAKGGAGYWYFDLWGRGTLVTVSSASTKGPSVFPLAPSSKSTSGGTAALGCLVKDYFPEPVTVSWNSGALTSGVHTFPAVLQSSGLYSLSSVVTVPSSSLGTQTYICNVNHKPSNTKVDKKVEPKSCDKTHTCPPCPAPEAAGGPSVFLFPPKPKDTLMISRTPEVTCVVVSVSHEDPEVKFNWYVDGVEVHNAKTKPREEQYNSTYRVVSVLTVLHQDWLNGKEYKCKVSNKALPAPIEKTISKAKGQPREPQVYTLPPSREEMTKNQVSLWCLVKGFYPSDIAVEWESNGQPENNYKTTPPVLDSDGSFFLYSKLTVDKSRWQQGNVFSCSVMHEALHNHYTQKSLSLSPGGGSEGKSSGSGSESKSTGGSDIQMTQSPSSLSASVGDRVTITCRASQSISSYLNWYQQKPGCAPKLLIYAASSLQSGVPSRFSGSGSGTDFTLTISSLQPEDFATYYCQQSYSTPLTFGQGTKVEIKGGGSGGSGGCPPCGGSGGEVQLLESGGGLVQPGGSLRLSCAASGFTFSSYAMSWVRQAPGKGLEWVSAISGSGGSTYYADSVKGRFTISRDNSKNTLYLQMNSLRAEDTAVYYCAKYDGIYGELDFWGCGTLVTVSS

SEQ ID NO: 898 - protein, 733 aa, Artificial Sequence
  C28B19 x Null x BCMB519 Heavy Chain 1 (Primary Transcript)
MAWVWTLLFLMAAAQSIQAQVQLQQPGSELVRPGASVKLSCKASGYTFTSYWMHWVKQRHGQGLEWIGNIYPGSGRTNYDEKFKSKGTLTVDTSSRTAYMHLSSLTSEDSAVYYCTREHYGSNSHPMDYWGQGTSVTVSSASTKGPSVFPLAPSSKSTSGGTAALGCLVKDYFPEPVTVSWNSGALTSGVHTFPAVLQSSGLYSLSSVVTVPSSSLGTQTYICNVNHKPSNTKVDKKVEPKSCDKTHTCPPCPAPEAAGGPSVFLFPPKPKDTLMISRTPEVTCVVVSVSHEDPEVKFNWYVDGVEVHNAKTKPREEQYNSTYRVVSVLTVLHQDWLNGKEYKCKVSNKALPAPIEKTISKAKGQPREPQVYTLPPSREEMTKNQVSLWCLVKGFYPSDIAVEWESNGQPENNYKTTPPVLDSDGSFFLYSKLTVDKSRWQQGNVFSCSVMHEALHNHYTQKSLSLSPGGGSEGKSSGSGSESKSTGGSDIQMTQSPSSLSASVGDRVTITCRASQSISSYLNWYQQKPGCAPKLLIYAASSLQSGVPSRFSGSGSGTDFTLTISSLQPEDFATYYCQQSYSTPLTFGQGTKVEIKGGGSGGSGGCPPCGGSGGEVQLLESGGGLVQPGGSLRLSCAASGFTFSSYAMSWVRQAPGKGLEWVSAISGSGGSTYYADSVKGRFTISRDNSKNTLYLQMNSLRAEDTAVYYCAKYDGIYGELDFWGCGTLVTVSS

SEQ ID NO: 899 - protein, 727 aa, Artificial Sequence
  C28B103 x Null x BCMB519 Heavy Chain 1 (Primary Transcript)
MAWVWTLLFLMAAAQSIQAQVQLQQWGAGLLKPSETLSLICAVYGGSFSGYYWSWIRQPPGKGLEWIGDINHSGNTNFNPSLKSRVTISVDTSKNQFSLKLSSVTAADTAVYYCAKGEAWFDPWGQGIMVTVSSASTKGPSVFPLAPSSKSTSGGTAALGCLVKDYFPEPVTVSWNSGALTSGVHTFPAVLQSSGLYSLSSVVTVPSSSLGTQTYICNVNHKPSNTKVDKKVEPKSCDKTHTCPPCPAPEAAGGPSVFLFPPKPKDTLMISRTPEVTCVVVSVSHEDPEVKFNWYVDGVEVHNAKTKPREEQYNSTYRVVSVLTVLHQDWLNGKEYKCKVSNKALPAPIEKTISKAKGQPREPQVYTLPPSREEMTKNQVSLWCLVKGFYPSDIAVEWESNGQPENNYKTTPPVLDSDGSFFLYSKLTVDKSRWQQGNVFSCSVMHEALHNHYTQKSLSLSPGGGSEGKSSGSGSESKSTGGSDIQMTQSPSSLSASVGDRVTITCRASQSISSYLNWYQQKPGCAPKLLIYAASSLQSGVPSRFSGSGSGTDFTLTISSLQPEDFATYYCQQSYSTPLTFGQGTKVEIKGGGSGGSGGCPPCGGSGGEVQLLESGGGLVQPGGSLRLSCAASGFTFSSYAMSWVRQAPGKGLEWVSAISGSGGSTYYADSVKGRFTISRDNSKNTLYLQMNSLRAEDTAVYYCAKYDGIYGELDFWGCGTLVTVSS

SEQ ID NO: 900 - protein, 727 aa, Artificial Sequence
  C28B105 x Null x BCMB519 Heavy Chain 1 (Primary Transcript)
MAWVWTLLFLMAAAQSIQAQVQLQQWGAGLLKPSETLSLTCAVYGGSFSGYYWNWIRQPPGKGLQWIGEINHSGTTNYNPSLKSRVTISVDTSKNQFSLKLSSLTAADTAVYYCARGEAVALYWGQGTLVTVSSASTKGPSVFPLAPSSKSTSGGTAALGCLVKDYFPEPVTVSWNSGALTSGVHTFPAVLQSSGLYSLSSVVTVPSSSLGTQTYICNVNHKPSNTKVDKKVEPKSCDKTHTCPPCPAPEAAGGPSVFLFPPKPKDTLMISRTPEVTCVVVSVSHEDPEVKFNWYVDGVEVHNAKTKPREEQYNSTYRVVSVLTVLHQDWLNGKEYKCKVSNKALPAPIEKTISKAKGQPREPQVYTLPPSREEMTKNQVSLWCLVKGFYPSDIAVEWESNGQPENNYKTTPPVLDSDGSFFLYSKLTVDKSRWQQGNVFSCSVMHEALHNHYTQKSLSLSPGGGSEGKSSGSGSESKSTGGSDIQMTQSPSSLSASVGDRVTITCRASQSISSYLNWYQQKPGCAPKLLIYAASSLQSGVPSRFSGSGSGTDFTLTISSLQPEDFATYYCQQSYSTPLTFGQGTKVEIKGGGSGGSGGCPPCGGSGGEVQLLESGGGLVQPGGSLRLSCAASGFTFSSYAMSWVRQAPGKGLEWVSAISGSGGSTYYADSVKGRFTISRDNSKNTLYLQMNSLRAEDTAVYYCAKYDGIYGELDFWGCGTLVTVSS

SEQ ID NO: 901 - protein, 732 aa, Artificial Sequence
  B21M x Null x BCMB519 Heavy Chain 1 (Primary Transcript)
MAWVWTLLFLMAAAQSIQAQITLKESGPTLVKPTQTLTLTCTFSGFSLSTSGMGVSWIRQPPGKALEWLAHIYWDDDKRYNPSLKSRLTITKDTSKNQVVLTMTNMDPVDTATYYCARLYGFTYGFAYWGQGTLVTVSSASTKGPSVFPLAPSSKSTSGGTAALGCLVKDYFPEPVTVSWNSGALTSGVHTFPAVLQSSGLYSLSSVVTVPSSSLGTQTYICNVNHKPSNTKVDKKVEPKSCDKTHTCPPCPAPEAAGGPSVFLFPPKPKDTLMISRTPEVTCVVVSVSHEDPEVKFNWYVDGVEVHNAKTKPREEQYNSTYRVVSVLTVLHQDWLNGKEYKCKVSNKALPAPIEKTISKAKGQPREPQVYTLPPSREEMTKNQVSLWCLVKGFYPSDIAVEWESNGQPENNYKTTPPVLDSDGSFFLYSKLTVDKSRWQQGNVFSCSVMHEALHNHYTQKSLSLSPGGGSEGKSSGSGSESKSTGGSDIQMTQSPSSLSASVGDRVTITCRASQSISSYLNWYQQKPGCAPKLLIYAASSLQSGVPSRFSGSGSGTDFTLTISSLQPEDFATYYCQQSYSTPLTFGQGTKVEIKGGGSGGSGGCPPCGGSGGEVQLLESGGGLVQPGGSLRLSCAASGFTFSSYAMSWVRQAPGKGLEWVSAISGSGGSTYYADSVKGRFTISRDNSKNTLYLQMNSLRAEDTAVYYCAKYDGIYGELDFWGCGTLVTVSS

SEQ ID NO: 902 - protein, 214 aa, Artificial Sequence
  C28B11 x B17B21 x BCMB519 Light Chain
EIVLTQSPATLSLSPGERAILSCRASQSVSSYLAWYQQKPGQAPRLLIYDASNRATGIPARFSGSGSGTDFTLTISSLEPEDFAVYYCQQRSNWPLTFGGGTKVEIKRTVAAPSVFIFPPSDEQLKSGTASVVCLLNNFYPREAKVQWKVDNALQSGNSQESVTEQDSKDSTYSLSSTLTLSKADYEKHKVYACEVTHQGLSSPVTKSFNRGEC

SEQ ID NO: 903 - protein, 214 aa, Artificial Sequence
  C28B19 x B17B21 x BCMB519 Light Chain
DIQMTQSPASLSASVGETVTITCGASENIYGSLNWYQRKQGKSPQLLIYGATNLADGMSSRFSGSGSGRQFSLKISSLHPDDVATYYCQNLLSTPYTFGGGTKLELKRTVAAPSVFIFPPSDEQLKSGTASVVCLLNNFYPREAKVQWKVDNALQSGNSQESVTEQDSKDSTYSLSSTLTLSKADYEKHKVYACEVTHQGLSSPVTKSFNRGEC

SEQ ID NO: 904 - protein, 214 aa, Artificial Sequence
  C28B103 x B17B21 x BCMB519 Light Chain
EIVMTQSPATLSVSPGERATLSCRASQSVRSNLDWYQQKPGQAPRLLIYGASTRATGIPARFSGSGSGTEFTLTISSLQSEDFAVYYCQQYNNWPLTFGGGTKVEIKRTVAAPSVFIFPPSDEQLKSGTASVVCLLNNFYPREAKVQWKVDNALQSGNSQESVTEQDSKDSTYSLSSTLTLSKADYEKHKVYACEVTHQGLSSPVTKSFNRGEC

SEQ ID NO: 905 - protein, 214 aa, Artificial Sequence
  C28B105 x B17B21 x BCMB519 Light Chain
EIVMTQSPATLSVSPGERATLSCRASQSVNSNLAWYQQKPGQAPRLLIYGASARATGIPARFSGSGSGTEFTLTISSLQSEDFAVYYCQQYYNWPLTFGGGTKVEIKRTVAAPSVFIFPPSDEQLKSGTASVVCLLNNFYPREAKVQWKVDNALQSGNSQESVTEQDSKDSTYSLSSTLTLSKADYEKHKVYACEVTHQGLSSPVTKSFNRGEC

SEQ ID NO: 906 - protein, 218 aa, Artificial Sequence; identical to SEQ ID NO: 18
  B21M x B17B21 x BCMB519 Light Chain

SEQ ID NO: 907 - protein, 214 aa, Artificial Sequence; identical to SEQ ID NO: 902
  C28B11 x Null x BCMB519 Light Chain

SEQ ID NO: 908 - protein, 214 aa, Artificial Sequence; identical to SEQ ID NO: 903
  C28B19 x Null x BCMB519 Light Chain

SEQ ID NO: 909 - protein, 214 aa, Artificial Sequence; identical to SEQ ID NO: 904
  C28B103 x Null x BCMB519 Light Chain

SEQ ID NO: 910 - protein, 214 aa, Artificial Sequence; identical to SEQ ID NO: 905
  C28B105 x Null x BCMB519 Light Chain

SEQ ID NO: 911 - protein, 218 aa, Artificial Sequence; identical to SEQ ID NO: 18
  B21M x Null x BCMB519 Light Chain

SEQ ID NO: 912 - protein, 233 aa, Artificial Sequence
  C28B11 x B17B21 x BCMB519 Light Chain (Primary Transcript)
MAWVWTLLFLMAAAQSIQAEIVLTQSPATLSLSPGERAILSCRASQSVSSYLAWYQQKPGQAPRLLIYDASNRATGIPARFSGSGSGTDFTLTISSLEPEDFAVYYCQQRSNWPLTFGGGTKVEIKRTVAAPSVFIFPPSDEQLKSGTASVVCLLNNFYPREAKVQWKVDNALQSGNSQESVTEQDSKDSTYSLSSTLTLSKADYEKHKVYACEVTHQGLSSPVTKSFNRGEC

SEQ ID NO: 913 - protein, 233 aa, Artificial Sequence
  C28B19 x B17B21 x BCMB519 Light Chain (Primary Transcript)
MAWVWTLLFLMAAAQSIQADIQMTQSPASLSASVGETVTITCGASENIYGSLNWYQRKQGKSPQLLIYGATNLADGMSSRFSGSGSGRQFSLKISSLHPDDVATYYCQNLLSTPYTFGGGTKLELKRTVAAPSVFIFPPSDEQLKSGTASVVCLLNNFYPREAKVQWKVDNALQSGNSQESVTEQDSKDSTYSLSSTLTLSKADYEKHKVYACEVTHQGLSSPVTKSFNRGEC

SEQ ID NO: 914 - protein, 233 aa, Artificial Sequence
  C28B103 x B17B21 x BCMB519 Light Chain (Primary Transcript)
MAWVWTLLFLMAAAQSIQAEIVMTQSPATLSVSPGERATLSCRASQSVRSNLDWYQQKPGQAPRLLIYGASTRATGIPARFSGSGSGTEFTLTISSLQSEDFAVYYCQQYNNWPLTFGGGTKVEIKRTVAAPSVFIFPPSDEQLKSGTASVVCLLNNFYPREAKVQWKVDNALQSGNSQESVTEQDSKDSTYSLSSTLTLSKADYEKHKVYACEVTHQGLSSPVTKSFNRGEC

SEQ ID NO: 915 - protein, 233 aa, Artificial Sequence
  C28B105 x B17B21 x BCMB519 Light Chain (Primary Transcript)
MAWVWTLLFLMAAAQSIQAEIVMTQSPATLSVSPGERATLSCRASQSVNSNLAWYQQKPGQAPRLLIYGASARATGIPARFSGSGSGTEFTLTISSLQSEDFAVYYCQQYYNWPLTFGGGTKVEIKRTVAAPSVFIFPPSDEQLKSGTASVVCLLNNFYPREAKVQWKVDNALQSGNSQESVTEQDSKDSTYSLSSTLTLSKADYEKHKVYACEVTHQGLSSPVTKSFNRGEC

SEQ ID NO: 916 - protein, 238 aa, Artificial Sequence; identical to SEQ ID NO: 567
  B21M x B17B21 x BCMB519 Light Chain (Primary Transcript)

SEQ ID NO: 917 - protein, 233 aa, Artificial Sequence; identical to SEQ ID NO: 912
  C28B11 x Null x BCMB519 Light Chain (Primary Transcript)

SEQ ID NO: 918 - protein, 233 aa, Artificial Sequence; identical to SEQ ID NO: 913
  C28B19 x Null x BCMB519 Light Chain (Primary Transcript)

SEQ ID NO: 919 - protein, 233 aa, Artificial Sequence; identical to SEQ ID NO: 914
  C28B103 x Null x BCMB519 Light Chain (Primary Transcript)

SEQ ID NO: 920 - protein, 233 aa, Artificial Sequence; identical to SEQ ID NO: 915
  C28B105 x Null x BCMB519 Light Chain (Primary Transcript)

SEQ ID NO: 921 - protein, 238 aa, Artificial Sequence; identical to SEQ ID NO: 567
  B21M x Null x BCMB519 Light Chain (Primary Transcript)

SEQ ID NO: 922 - protein, 720 aa, Artificial Sequence
  C28B11 x B17B21 x BCMB519 Heavy Chain 2
EVQLLESGGGLGQPGGSLRLSCAASEFTFTSYAMSWVRQAPGKGLEWVSAISGSGGRTYYADSVKGRFTISRDNSKNTLYLQMNSLRAEDTAVYYCAKGGAGYWYFDLWGRGTLVTVSSASTKGPSVFPLAPSSKSTSGGTAALGCLVKDYFPEPVTVSWNSGALTSGVHTFPAVLQSSGLYSLSSVVTVPSSSLGTQTYICNVNHKPSNTKVDKKVEPKSCDKTHTCPPCPAPEAAGGPSVFLFPPKPKDTLMISRTPEVTCVVVSVSHEDPEVKFNWYVDGVEVHNAKTKPREEQYNSTYRVVSVLTVLHQDWLNGKEYKCKVSNKALPAPIEKTISKAKGQPREPQVYTLPPSREEMTKNQVSLSCAVKGFYPSDIAVEWESNGQPENNYKTTPPVLDSDGSFFLVSKLTVDKSRWQQGNVFSCSVMHEALHNRFTQKSLSLSPGGGSEGKSSGSGSESKSTGGSEIVLTQSPGTLSLSPGERATLSCRASQSISSSFLTWYQQKPGQAPRLLIYGASSRATGIPDRFSGGGSGTDFTLTISRLEPEDFAVYYCQHYGSSPMYTFGQGTKLEIKGGSEGKSSGSGSESKSTGGSEVQLLESGGGLVQPGGSLRLSCAASGFTFSSYAMSWVRQAPGKGLEWVSAISGSGGSTYYADSVKGRFTISRDNSKNTLYLQMNSLRAEDTAVYYCAKDEGYSSGHYYGMDVWGQGTTVTVSS

SEQ ID NO: 923 - protein, 722 aa, Artificial Sequence
  C28B19 x B17B21 x BCMB519 Heavy Chain 2
QVQLQQPGSELVRPGASVKLSCKASGYTFTSYWMHWVKQRHGQGLEWIGNIYPGSGRTNYDEKFKSKGTLTVDTSSRTAYMHLSSLTSEDSAVYYCTREHYGSNSHPMDYWGQGTSVTVSSASTKGPSVFPLAPSSKSTSGGTAALGCLVKDYFPEPVTVSWNSGALTSGVHTFPAVLQSSGLYSLSSVVTVPSSSLGTQTYICNVNHKPSNTKVDKKVEPKSCDKTHTCPPCPAPEAAGGPSVFLFPPKPKDTLMISRTPEVTCVVVSVSHEDPEVKFNWYVDGVEVHNAKTKPREEQYNSTYRVVSVLTVLHQDWLNGKEYKCKVSNKALPAPIEKTISKAKGQPREPQVYTLPPSREEMTKNQVSLSCAVKGFYPSDIAVEWESNGQPENNYKTTPPVLDSDGSFFLVSKLTVDKSRWQQGNVFSCSVMHEALHNRFTQKSLSLSPGGGSEGKSSGSGSESKSTGGSEIVLTQSPGTLSLSPGERATLSCRASQSISSSFLTWYQQKPGQAPRLLIYGASSRATGIPDRFSGGGSGTDFTLTISRLEPEDFAVYYCQHYGSSPMYTFGQGTKLEIKGGSEGKSSGSGSESKSTGGSEVQLLESGGGLVQPGGSLRLSCAASGFTFSSYAMSWVRQAPGKGLEWVSAISGSGGSTYYADSVKGRFTISRDNSKNTLYLQMNSLRAEDTAVYYCAKDEGYSSGHYYGMDVWGQGTTVTVSS

SEQ ID NO: 924 - protein, 716 aa, Artificial Sequence
  C28B103 x B17B21 x BCMB519 Heavy Chain 2
QVQLQQWGAGLLKPSETLSLICAVYGGSFSGYYWSWIRQPPGKGLEWIGDINHSGNTNFNPSLKSRVTISVDTSKNQFSLKLSSVTAADTAVYYCAKGEAWFDPWGQGIMVTVSSASTKGPSVFPLAPSSKSTSGGTAALGCLVKDYFPEPVTVSWNSGALTSGVHTFPAVLQSSGLYSLSSVVTVPSSSLGTQTYICNVNHKPSNTKVDKKVEPKSCDKTHTCPPCPAPEAAGGPSVFLFPPKPKDTLMISRTPEVTCVVVSVSHEDPEVKFNWYVDGVEVHNAKTKPREEQYNSTYRVVSVLTVLHQDWLNGKEYKCKVSNKALPAPIEKTISKAKGQPREPQVYTLPPSREEMTKNQVSLSCAVKGFYPSDIAVEWESNGQPENNYKTTPPVLDSDGSFFLVSKLTVDKSRWQQGNVFSCSVMHEALHNRFTQKSLSLSPGGGSEGKSSGSGSESKSTGGSEIVLTQSPGTLSLSPGERATLSCRASQSISSSFLTWYQQKPGQAPRLLIYGASSRATGIPDRFSGGGSGTDFTLTISRLEPEDFAVYYCQHYGSSPMYTFGQGTKLEIKGGSEGKSSGSGSESKSTGGSEVQLLESGGGLVQPGGSLRLSCAASGFTFSSYAMSWVRQAPGKGLEWVSAISGSGGSTYYADSVKGRFTISRDNSKNTLYLQMNSLRAEDTAVYYCAKDEGYSSGHYYGMDVWGQGTTVTVSS

SEQ ID NO: 925 - protein, 716 aa, Artificial Sequence
  C28B105 x B17B21 x BCMB519 Heavy Chain 2
QVQLQQWGAGLLKPSETLSLTCAVYGGSFSGYYWNWIRQPPGKGLQWIGEINHSGTTNYNPSLKSRVTISVDTSKNQFSLKLSSLTAADTAVYYCARGEAVALYWGQGTLVTVSSASTKGPSVFPLAPSSKSTSGGTAALGCLVKDYFPEPVTVSWNSGALTSGVHTFPAVLQSSGLYSLSSVVTVPSSSLGTQTYICNVNHKPSNTKVDKKVEPKSCDKTHTCPPCPAPEAAGGPSVFLFPPKPKDTLMISRTPEVTCVVVSVSHEDPEVKFNWYVDGVEVHNAKTKPREEQYNSTYRVVSVLTVLHQDWLNGKEYKCKVSNKALPAPIEKTISKAKGQPREPQVYTLPPSREEMTKNQVSLSCAVKGFYPSDIAVEWESNGQPENNYKTTPPVLDSDGSFFLVSKLTVDKSRWQQGNVFSCSVMHEALHNRFTQKSLSLSPGGGSEGKSSGSGSESKSTGGSEIVLTQSPGTLSLSPGERATLSCRASQSISSSFLTWYQQKPGQAPRLLIYGASSRATGIPDRFSGGGSGTDFTLTISRLEPEDFAVYYCQHYGSSPMYTFGQGTKLEIKGGSEGKSSGSGSESKSTGGSEVQLLESGGGLVQPGGSLRLSCAASGFTFSSYAMSWVRQAPGKGLEWVSAISGSGGSTYYADSVKGRFTISRDNSKNTLYLQMNSLRAEDTAVYYCAKDEGYSSGHYYGMDVWGQGTTVTVSS

SEQ ID NO: 926 - protein, 721 aa, Artificial Sequence
  B21M x B17B21 x BCMB519 Heavy Chain 2
QITLKESGPTLVKPTQTLTLTCTFSGFSLSTSGMGVSWIRQPPGKALEWLAHIYWDDDKRYNPSLKSRLTITKDTSKNQVVLTMTNMDPVDTATYYCARLYGFTYGFAYWGQGTLVTVSSASTKGPSVFPLAPSSKSTSGGTAALGCLVKDYFPEPVTVSWNSGALTSGVHTFPAVLQSSGLYSLSSVVTVPSSSLGTQTYICNVNHKPSNTKVDKKVEPKSCDKTHTCPPCPAPEAAGGPSVFLFPPKPKDTLMISRTPEVTCVVVSVSHEDPEVKFNWYVDGVEVHNAKTKPREEQYNSTYRVVSVLTVLHQDWLNGKEYKCKVSNKALPAPIEKTISKAKGQPREPQVYTLPPSREEMTKNQVSLSCAVKGFYPSDIAVEWESNGQPENNYKTTPPVLDSDGSFFLVSKLTVDKSRWQQGNVFSCSVMHEALHNRFTQKSLSLSPGGGSEGKSSGSGSESKSTGGSEIVLTQSPGTLSLSPGERATLSCRASQSISSSFLTWYQQKPGQAPRLLIYGASSRATGIPDRFSGGGSGTDFTLTISRLEPEDFAVYYCQHYGSSPMYTFGQGTKLEIKGGSEGKSSGSGSESKSTGGSEVQLLESGGGLVQPGGSLRLSCAASGFTFSSYAMSWVRQAPGKGLEWVSAISGSGGSTYYADSVKGRFTISRDNSKNTLYLQMNSLRAEDTAVYYCAKDEGYSSGHYYGMDVWGQGTTVTVSS

SEQ ID NO: 927 - protein, 720 aa, Artificial Sequence; identical to SEQ ID NO: 922
  C28B11 x Null x BCMB519 Heavy Chain 2

SEQ ID NO: 928 - protein, 722 aa, Artificial Sequence; identical to SEQ ID NO: 923
  C28B19 x Null x BCMB519 Heavy Chain 2

SEQ ID NO: 929 - protein, 716 aa, Artificial Sequence; identical to SEQ ID NO: 924
  C28B103 x Null x BCMB519 Heavy Chain 2

SEQ ID NO: 930 - protein, 716 aa, Artificial Sequence; identical to SEQ ID NO: 925
  C28B105 x Null x BCMB519 Heavy Chain 2

SEQ ID NO: 931 - protein, 721 aa, Artificial Sequence; identical to SEQ ID NO: 926
  B21M x Null x BCMB519 Heavy Chain 2

SEQ ID NO: 932 - protein, 739 aa, Artificial Sequence
  C28B11 x B17B21 x BCMB519 Heavy Chain 2 (Primary Transcript)
MAWVWTLLFLMAAAQSIQAEVQLLESGGGLGQPGGSLRLSCAASEFTFTSYAMSWVRQAPGKGLEWVSAISGSGGRTYYADSVKGRFTISRDNSKNTLYLQMNSLRAEDTAVYYCAKGGAGYWYFDLWGRGTLVTVSSASTKGPSVFPLAPSSKSTSGGTAALGCLVKDYFPEPVTVSWNSGALTSGVHTFPAVLQSSGLYSLSSVVTVPSSSLGTQTYICNVNHKPSNTKVDKKVEPKSCDKTHTCPPCPAPEAAGGPSVFLFPPKPKDTLMISRTPEVTCVVVSVSHEDPEVKFNWYVDGVEVHNAKTKPREEQYNSTYRVVSVLTVLHQDWLNGKEYKCKVSNKALPAPIEKTISKAKGQPREPQVYTLPPSREEMTKNQVSLSCAVKGFYPSDIAVEWESNGQPENNYKTTPPVLDSDGSFFLVSKLTVDKSRWQQGNVFSCSVMHEALHNRFTQKSLSLSPGGGSEGKSSGSGSESKSTGGSEIVLTQSPGTLSLSPGERATLSCRASQSISSSFLTWYQQKPGQAPRLLIYGASSRATGIPDRFSGGGSGTDFTLTISRLEPEDFAVYYCQHYGSSPMYTFGQGTKLEIKGGSEGKSSGSGSESKSTGGSEVQLLESGGGLVQPGGSLRLSCAASGFTFSSYAMSWVRQAPGKGLEWVSAISGSGGSTYYADSVKGRFTISRDNSKNTLYLQMNSLRAEDTAVYYCAKDEGYSSGHYYGMDVWGQGTTVTVSS

SEQ ID NO: 933 - protein, 741 aa, Artificial Sequence
  C28B19 x B17B21 x BCMB519 Heavy Chain 2 (Primary Transcript)
MAWVWTLLFLMAAAQSIQAQVQLQQPGSELVRPGASVKLSCKASGYTFTSYWMHWVKQRHGQGLEWIGNIYPGSGRTNYDEKFKSKGTLTVDTSSRTAYMHLSSLTSEDSAVYYCTREHYGSNSHPMDYWGQGTSVTVSSASTKGPSVFPLAPSSKSTSGGTAALGCLVKDYFPEPVTVSWNSGALTSGVHTFPAVLQSSGLYSLSSVVTVPSSSLGTQTYICNVNHKPSNTKVDKKVEPKSCDKTHTCPPCPAPEAAGGPSVFLFPPKPKDTLMISRTPEVTCVVVSVSHEDPEVKFNWYVDGVEVHNAKTKPREEQYNSTYRVVSVLTVLHQDWLNGKEYKCKVSNKALPAPIEKTISKAKGQPREPQVYTLPPSREEMTKNQVSLSCAVKGFYPSDIAVEWESNGQPENNYKTTPPVLDSDGSFFLVSKLTVDKSRWQQGNVFSCSVMHEALHNRFTQKSLSLSPGGGSEGKSSGSGSESKSTGGSEIVLTQSPGTLSLSPGERATLSCRASQSISSSFLTWYQQKPGQAPRLLIYGASSRATGIPDRFSGGGSGTDFTLTISRLEPEDFAVYYCQHYGSSPMYTFGQGTKLEIKGGSEGKSSGSGSESKSTGGSEVQLLESGGGLVQPGGSLRLSCAASGFTFSSYAMSWVRQAPGKGLEWVSAISGSGGSTYYADSVKGRFTISRDNSKNTLYLQMNSLRAEDTAVYYCAKDEGYSSGHYYGMDVWGQGTTVTVSS

SEQ ID NO: 934 - protein, 735 aa, Artificial Sequence
  C28B103 x B17B21 x BCMB519 Heavy Chain 2 (Primary Transcript)
MAWVWTLLFLMAAAQSIQAQVQLQQWGAGLLKPSETLSLICAVYGGSFSGYYWSWIRQPPGKGLEWIGDINHSGNTNFNPSLKSRVTISVDTSKNQFSLKLSSVTAADTAVYYCAKGEAWFDPWGQGIMVTVSSASTKGPSVFPLAPSSKSTSGGTAALGCLVKDYFPEPVTVSWNSGALTSGVHTFPAVLQSSGLYSLSSVVTVPSSSLGTQTYICNVNHKPSNTKVDKKVEPKSCDKTHTCPPCPAPEAAGGPSVFLFPPKPKDTLMISRTPEVTCVVVSVSHEDPEVKFNWYVDGVEVHNAKTKPREEQYNSTYRVVSVLTVLHQDWLNGKEYKCKVSNKALPAPIEKTISKAKGQPREPQVYTLPPSREEMTKNQVSLSCAVKGFYPSDIAVEWESNGQPENNYKTTPPVLDSDGSFFLVSKLTVDKSRWQQGNVFSCSVMHEALHNRFTQKSLSLSPGGGSEGKSSGSGSESKSTGGSEIVLTQSPGTLSLSPGERATLSCRASQSISSSFLTWYQQKPGQAPRLLIYGASSRATGIPDRFSGGGSGTDFTLTISRLEPEDFAVYYCQHYGSSPMYTFGQGTKLEIKGGSEGKSSGSGSESKSTGGSEVQLLESGGGLVQPGGSLRLSCAASGFTFSSYAMSWVRQAPGKGLEWVSAISGSGGSTYYADSVKGRFTISRDNSKNTLYLQMNSLRAEDTAVYYCAKDEGYSSGHYYGMDVWGQGTTVTVSS

SEQ ID NO: 935 - protein, 735 aa, Artificial Sequence
  C28B105 x B17B21 x BCMB519 Heavy Chain 2 (Primary Transcript)
MAWVWTLLFLMAAAQSIQAQVQLQQWGAGLLKPSETLSLTCAVYGGSFSGYYWNWIRQPPGKGLQWIGEINHSGTTNYNPSLKSRVTISVDTSKNQFSLKLSSLTAADTAVYYCARGEAVALYWGQGTLVTVSSASTKGPSVFPLAPSSKSTSGGTAALGCLVKDYFPEPVTVSWNSGALTSGVHTFPAVLQSSGLYSLSSVVTVPSSSLGTQTYICNVNHKPSNTKVDKKVEPKSCDKTHTCPPCPAPEAAGGPSVFLFPPKPKDTLMISRTPEVTCVVVSVSHEDPEVKFNWYVDGVEVHNAKTKPREEQYNSTYRVVSVLTVLHQDWLNGKEYKCKVSNKALPAPIEKTISKAKGQPREPQVYTLPPSREEMTKNQVSLSCAVKGFYPSDIAVEWESNGQPENNYKTTPPVLDSDGSFFLVSKLTVDKSRWQQGNVFSCSVMHEALHNRFTQKSLSLSPGGGSEGKSSGSGSESKSTGGSEIVLTQSPGTLSLSPGERATLSCRASQSISSSFLTWYQQKPGQAPRLLIYGASSRATGIPDRFSGGGSGTDFTLTISRLEPEDFAVYYCQHYGSSPMYTFGQGTKLEIKGGSEGKSSGSGSESKSTGGSEVQLLESGGGLVQPGGSLRLSCAASGFTFSSYAMSWVRQAPGKGLEWVSAISGSGGSTYYADSVKGRFTISRDNSKNTLYLQMNSLRAEDTAVYYCAKDEGYSSGHYYGMDVWGQGTTVTVSS

SEQ ID NO: 936 - protein, 740 aa, Artificial Sequence
  B21M x B17B21 x BCMB519 Heavy Chain 2 (Primary Transcript)
MAWVWTLLFLMAAAQSIQAQITLKESGPTLVKPTQTLTLTCTFSGFSLSTSGMGVSWIRQPPGKALEWLAHIYWDDDKRYNPSLKSRLTITKDTSKNQVVLTMTNMDPVDTATYYCARLYGFTYGFAYWGQGTLVTVSSASTKGPSVFPLAPSSKSTSGGTAALGCLVKDYFPEPVTVSWNSGALTSGVHTFPAVLQSSGLYSLSSVVTVPSSSLGTQTYICNVNHKPSNTKVDKKVEPKSCDKTHTCPPCPAPEAAGGPSVFLFPPKPKDTLMISRTPEVTCVVVSVSHEDPEVKFNWYVDGVEVHNAKTKPREEQYNSTYRVVSVLTVLHQDWLNGKEYKCKVSNKALPAPIEKTISKAKGQPREPQVYTLPPSREEMTKNQVSLSCAVKGFYPSDIAVEWESNGQPENNYKTTPPVLDSDGSFFLVSKLTVDKSRWQQGNVFSCSVMHEALHNRFTQKSLSLSPGGGSEGKSSGSGSESKSTGGSEIVLTQSPGTLSLSPGERATLSCRASQSISSSFLTWYQQKPGQAPRLLIYGASSRATGIPDRFSGGGSGTDFTLTISRLEPEDFAVYYCQHYGSSPMYTFGQGTKLEIKGGSEGKSSGSGSESKSTGGSEVQLLESGGGLVQPGGSLRLSCAASGFTFSSYAMSWVRQAPGKGLEWVSAISGSGGSTYYADSVKGRFTISRDNSKNTLYLQMNSLRAEDTAVYYCAKDEGYSSGHYYGMDVWGQGTTVTVSS

SEQ ID NO: 937 - protein, 739 aa, Artificial Sequence; identical to SEQ ID NO: 932
  C28B11 x Null x BCMB519 Heavy Chain 2 (Primary Transcript)

SEQ ID NO: 938 - protein, 741 aa, Artificial Sequence; identical to SEQ ID NO: 933
  C28B19 x Null x BCMB519 Heavy Chain 2 (Primary Transcript)

SEQ ID NO: 939 - protein, 735 aa, Artificial Sequence; identical to SEQ ID NO: 934
  C28B103 x Null x BCMB519 Heavy Chain 2 (Primary Transcript)

SEQ ID NO: 940 - protein, 735 aa, Artificial Sequence; identical to SEQ ID NO: 935
  C28B105 x Null x BCMB519 Heavy Chain 2 (Primary Transcript)

SEQ ID NO: 941 - protein, 740 aa, Artificial Sequence; identical to SEQ ID NO: 936
  B21M x Null x BCMB519 Heavy Chain 2 (Primary Transcript)

SEQ ID NO: 942 - protein, 449 aa, Artificial Sequence
  B17B619 Heavy Chain 1
QVQLQESGPGLVKPSETLSLTCTVSGYSITSGYFWNWIRQPPGKGLEWIGYISYDGSNNYNPSLKSRVTISRDTSKNQFSLKLSSVTAADTAVYYCASPSPGTGYAVDYWGQGTLVTVSSASTKGPSVFPLAPSSKSTSGGTAALGCLVKDYFPEPVTVSWNSGALTSGVHTFPAVLQSSGLYSLSSVVTVPSSSLGTQTYICNVNHKPSNTKVDKKVEPKSCDKTHTCPPCPAPEAAGGPSVFLFPPKPKDTLMISRTPEVTCVVVSVSHEDPEVKFNWYVDGVEVHNAKTKPREEQYNSTYRVVSVLTVLHQDWLNGKEYKCKVSNKALPAPIEKTISKAKGQPREPQVYVYPPSREEMTKNQVSLTCLVKGFYPSDIAVEWESNGQPENNYKTTPPVLDSDGSFALVSKLTVDKSRWQQGNVFSCSVMHEALHNRFTQKSLSLSPG

SEQ ID NO: 943 - protein, 449 aa, Artificial Sequence; identical to SEQ ID NO: 942
  B17B620 Heavy Chain 1

SEQ ID NO: 944 - protein, 722 aa, Artificial Sequence; identical to SEQ ID NO: 883
  VB28B16 Heavy Chain 1

SEQ ID NO: 945 - protein, 716 aa, Artificial Sequence; identical to SEQ ID NO: 885
  VB28B17 Heavy Chain 1

SEQ ID NO: 946 - protein, 721 aa, Artificial Sequence; identical to SEQ ID NO: 886
  VB28B18 Heavy Chain 1

SEQ ID NO: 947 - protein, 714 aa, Artificial Sequence; identical to SEQ ID NO: 888
  VB28B19 Heavy Chain 1

SEQ ID NO: 948 - protein, 708 aa, Artificial Sequence; identical to SEQ ID NO: 890
  VB28B20 Heavy Chain 1

SEQ ID NO: 949 - protein, 713 aa, Artificial Sequence; identical to SEQ ID NO: 891
  VB28B21 Heavy Chain 1

SEQ ID NO: 950 - protein, 722 aa, Artificial Sequence; identical to SEQ ID NO: 883
  VB28B22 Heavy Chain 1

SEQ ID NO: 951 - protein, 716 aa, Artificial Sequence; identical to SEQ ID NO: 885
  VB28B23 Heavy Chain 1

SEQ ID NO: 952 - protein, 721 aa, Artificial Sequence; identical to SEQ ID NO: 886
  VB28B24 Heavy Chain 1

SEQ ID NO: 953 - protein, 714 aa, Artificial Sequence; identical to SEQ ID NO: 888
  VB28B25 Heavy Chain 1

SEQ ID NO: 954 - protein, 708 aa, Artificial Sequence; identical to SEQ ID NO: 890
  VB28B26 Heavy Chain 1

SEQ ID NO: 955 - protein, 713 aa, Artificial Sequence; identical to SEQ ID NO: 891
  VB28B27 Heavy Chain 1

SEQ ID NO: 956 - protein, 476 aa, Artificial Sequence
  VB28B29 Heavy Chain 1
DIQMTQSPSSLSASVGDRVTITCRASQSISSYLNWYQQKPGCAPKLLIYAASSLQSGVPSRFSGSGSGTDFTLTISSLQPEDFATYYCQQSYSTPLTFGQGTKVEIKGGGSGGSGGCPPCGGSGGEVQLLESGGGLVQPGGSLRLSCAASGFTFSSYAMSWVRQAPGKGLEWVSAISGSGGSTYYADSVKGRFTISRDNSKNTLYLQMNSLRAEDTAVYYCAKYDGIYGELDFWGCGTLVTVSSEPKSSDKTHTCPPCPAPEAAGGPSVFLFPPKPKDTLMISRTPEVTCVVVSVSHEDPEVKFNWYVDGVEVHNAKTKPREEQYNSTYRVVSVLTVLHQDWLNGKEYKCKVSNKALPAPIEKTISKAKGQPREPQVYTLPPSREEMTKNQVSLWCLVKGFYPSDIAVEWESNGQPENNYKTTPPVLDSDGSFFLYSKLTVDKSRWQQGNVFSCSVMHEALHNHYTQKSLSLSPGK

SEQ ID NO: 957 - protein, 484 aa, Artificial Sequence
  VB28B31 Heavy Chain 1
DIQMTQSPSTLSASVGDRVTITCRASQSISSWLAWYQQKPGKAPKLLIYKASSLESGVPSRFSGSGSGTEFTLTISSLQPDDFATYYCQQYNSYSRTFGQGTKVEIKGGSEGKSSGSGSESKSTGGSQLQLQESGPGLVKPSETLSLTCTVSGASISSPSYYWGWIRQPPGKGLEWIGSIFYSGSSYYNPSLKSRVIMSVDTSKNQFSLKLSSVTAADTALYYCASQSGVSGWYGAEYFQHWGQGTLVTVSSEPKSSDKTHTCPPCPAPEAAGGPSVFLFPPKPKDTLMISRTPEVTCVVVSVSHEDPEVKFNWYVDGVEVHNAKTKPREEQYNSTYRVVSVLTVLHQDWLNGKEYKCKVSNKALPAPIEKTISKAKGQPREPQVYTLPPSREEMTKNQVSLWCLVKGFYPSDIAVEWESNGQPENNYKTTPPVLDSDGSFFLYSKLTVDKSRWQQGNVFSCSVMHEALHNHYTQKSLSLSPGK

SEQ ID NO: 958 - protein, 484 aa, Artificial Sequence; identical to SEQ ID NO: 957
  VB28B32 Heavy Chain 1

SEQ ID NO: 959 - protein, 476 aa, Artificial Sequence; identical to SEQ ID NO: 956
  VB28B33 Heavy Chain 1

SEQ ID NO: 960 - protein, 484 aa, Artificial Sequence
  VB28B35 Heavy Chain 1
DIQMTQSPSSLSASVGDRVTITCRSSQSLVHSSGNTYLHWYQQKPGKAPKFLIYKVSNRFSGVPSRFSGSGSGTDFTLTISSLQPEDFATYYCSQSTHVPFTFGQGTKLEIKGGSEGKSSGSGSESKSTGGSQVQLQESGPGLVKPSETLSLTCTVSGYSITSGYFWNWIRQPPGKGLEWIGYISYDGSNNYNPSLKSRVTISRDTSKNQFSLKLSSVTAADTAVYYCASPSPGTGYAVDYWGQGTLVTVSSEPKSSDKTHTCPPCPAPEAAGGPSVFLFPPKPKDTLMISRTPEVTCVVVSVSHEDPEVKFNWYVDGVEVHNAKTKPREEQYNSTYRVVSVLTVLHQDWLNGKEYKCKVSNKALPAPIEKTISKAKGQPREPQVYTLPPSREEMTKNQVSLWCLVKGFYPSDIAVEWESNGQPENNYKTTPPVLDSDGSFFLYSKLTVDKSRWQQGNVFSCSVMHEALHNHYTQKSLSLSPGK

SEQ ID NO: 961 - protein, 476 aa, Artificial Sequence; identical to SEQ ID NO: 956
  VB28B36 Heavy Chain 1

SEQ ID NO: 962 - protein, 484 aa, Artificial Sequence
  VB28B38 Heavy Chain 1
EIVLTQSPGTLSLSPGERATLSCRASQSISSSFLTWYQQKPGQAPRLLIYGASSRATGIPDRFSGGGSGTDFTLTISRLEPEDFAVYYCQHYGSSPMYTFGQGTKLEIKGGSEGKSSGSGSESKSTGGSEVQLLESGGGLVQPGGSLRLSCAASGFTFSSYAMSWVRQAPGKGLEWVSAISGSGGSTYYADSVKGRFTISRDNSKNTLYLQMNSLRAEDTAVYYCAKDEGYSSGHYYGMDVWGQGTTVTVSSEPKSSDKTHTCPPCPAPEAAGGPSVFLFPPKPKDTLMISRTPEVTCVVVSVSHEDPEVKFNWYVDGVEVHNAKTKPREEQYNSTYRVVSVLTVLHQDWLNGKEYKCKVSNKALPAPIEKTISKAKGQPREPQVYTLPPSREEMTKNQVSLWCLVKGFYPSDIAVEWESNGQPENNYKTTPPVLDSDGSFFLYSKLTVDKSRWQQGNVFSCSVMHEALHNHYTQKSLSLSPGK

SEQ ID NO: 963 - protein, 484 aa, Artificial Sequence; identical to SEQ ID NO: 962
  VB28B39 Heavy Chain 1

SEQ ID NO: 964 - protein, 484 aa, Artificial Sequence; identical to SEQ ID NO: 960
  VB28B40 Heavy Chain 1

SEQ ID NO: 965 - protein, 219 aa, Artificial Sequence
  B17B619 Light Chain 1
DIQMTQSPSSLSASVGDRVTITCRSSQSLVHSSGNTYLHWYQQKPGKAPKFLIYKVSNRFSGVPSRFSGSGSGTDFTLTISSLQPEDFATYYCSQSTHVPFTFGQGTKLEIKRTVAAPSVFIFPPSDEQLKSGTASVVCLLNNFYPREAKVQWKVDNALQSGNSQESVTEQDSKDSTYSLSSTLTLSKADYEKHKVYACEVTHQGLSSPVTKSFNRGEC

SEQ ID NO: 966 - protein, 219 aa, Artificial Sequence; identical to SEQ ID NO: 965
  B17B620 Light Chain 1

SEQ ID NO: 967 - protein, 214 aa, Artificial Sequence; identical to SEQ ID NO: 903
  VB28B16 Light Chain 1

SEQ ID NO: 968 - protein, 214 aa, Artificial Sequence; identical to SEQ ID NO: 905
  VB28B17 Light Chain 1

SEQ ID NO: 969 - protein, 218 aa, Artificial Sequence; identical to SEQ ID NO: 18
  VB28B18 Light Chain 1

SEQ ID NO: 970 - protein, 214 aa, Artificial Sequence; identical to SEQ ID NO: 903
  VB28B19 Light Chain 1

SEQ ID NO: 971 - protein, 214 aa, Artificial Sequence; identical to SEQ ID NO: 905
  VB28B20 Light Chain 1

SEQ ID NO: 972 - protein, 218 aa, Artificial Sequence; identical to SEQ ID NO: 18
  VB28B21 Light Chain 1

SEQ ID NO: 973 - protein, 214 aa, Artificial Sequence; identical to SEQ ID NO: 903
  VB28B22 Light Chain 1

SEQ ID NO: 974 - protein, 214 aa, Artificial Sequence; identical to SEQ ID NO: 905
  VB28B23 Light Chain 1

SEQ ID NO: 975 - protein, 218 aa, Artificial Sequence; identical to SEQ ID NO: 18
  VB28B24 Light Chain 1

SEQ ID NO: 976 - protein, 214 aa, Artificial Sequence; identical to SEQ ID NO: 903
  VB28B25 Light Chain 1

SEQ ID NO: 977 - protein, 214 aa, Artificial Sequence; identical to SEQ ID NO: 905
  VB28B26 Light Chain 1

SEQ ID NO: 978 - protein, 218 aa, Artificial Sequence; identical to SEQ ID NO: 18
  VB28B27 Light Chain 1

SEQ ID NO: 979 - protein, 475 aa, Artificial Sequence
  B17B620 Heavy Chain 2
DIQMTQSPSSLSASVGDRVTITCRASQSISSYLNWYQQKPGCAPKLLIYAASSLQSGVPSRFSGSGSGTDFTLTISSLQPEDFATYYCQQSYSTPLTFGQGTKVEIKGGGSGGSGGCPPCGGSGGEVQLLESGGGLVQPGGSLRLSCAASGFTFSSYAMSWVRQAPGKGLEWVSAISGSGGSTYYADSVKGRFTISRDNSKNTLYLQMNSLRAEDTAVYYCAKYDGIYGELDFWGCGTLVTVSSEPKSSDKTHTCPPCPAPEAAGGPSVFLFPPKPKDTLMISRTPEVTCVVVSVSHEDPEVKFNWYVDGVEVHNAKTKPREEQYNSTYRVVSVLTVLHQDWLNGKEYKCKVSNKALPAPIEKTISKAKGQPREPQVYVLPPSREEMTKNQVSLLCLVKGFYPSDIAVEWESNGQPENNYLTWPPVLDSDGSFFLYSKLTVDKSRWQQGNVFSCSVMHEALHNHYTQKSLSLSPG

SEQ ID NO: 980 - protein, 451 aa, Artificial Sequence
  VB28B16 Heavy Chain 2
QVQLQQPGSELVRPGASVKLSCKASGYTFTSYWMHWVKQRHGQGLEWIGNIYPGSGRTNYDEKFKSKGTLTVDTSSRTAYMHLSSLTSEDSAVYYCTREHYGSNSHPMDYWGQGTSVTVSSASTKGPSVFPLAPSSKSTSGGTAALGCLVKDYFPEPVTVSWNSGALTSGVHTFPAVLQSSGLYSLSSVVTVPSSSLGTQTYICNVNHKPSNTKVDKKVEPKSCDKTHTCPPCPAPEAAGGPSVFLFPPKPKDTLMISRTPEVTCVVVSVSHEDPEVKFNWYVDGVEVHNAKTKPREEQYNSTYRVVSVLTVLHQDWLNGKEYKCKVSNKALPAPIEKTISKAKGQPREPQVYTLPPSREEMTKNQVSLSCAVKGFYPSDIAVEWESNGQPENNYKTTPPVLDSDGSFFLVSKLTVDKSRWQQGNVFSCSVMHEALHNRFTQKSLSLSPGK

SEQ ID NO: 981 - protein, 445 aa, Artificial Sequence
  VB28B17 Heavy Chain 2
QVQLQQWGAGLLKPSETLSLTCAVYGGSFSGYYWNWIRQPPGKGLQWIGEINHSGTTNYNPSLKSRVTISVDTSKNQFSLKLSSLTAADTAVYYCARGEAVALYWGQGTLVTVSSASTKGPSVFPLAPSSKSTSGGTAALGCLVKDYFPEPVTVSWNSGALTSGVHTFPAVLQSSGLYSLSSVVTVPSSSLGTQTYICNVNHKPSNTKVDKKVEPKSCDKTHTCPPCPAPEAAGGPSVFLFPPKPKDTLMISRTPEVTCVVVSVSHEDPEVKFNWYVDGVEVHNAKTKPREEQYNSTYRVVSVLTVLHQDWLNGKEYKCKVSNKALPAPIEKTISKAKGQPREPQVYTLPPSREEMTKNQVSLSCAVKGFYPSDIAVEWESNGQPENNYKTTPPVLDSDGSFFLVSKLTVDKSRWQQGNVFSCSVMHEALHNRFTQKSLSLSPGK

SEQ ID NO: 982 - protein, 450 aa, Artificial Sequence
  VB28B18 Heavy Chain 2
QITLKESGPTLVKPTQTLTLTCTFSGFSLSTSGMGVSWIRQPPGKALEWLAHIYWDDDKRYNPSLKSRLTITKDTSKNQVVLTMTNMDPVDTATYYCARLYGFTYGFAYWGQGTLVTVSSASTKGPSVFPLAPSSKSTSGGTAALGCLVKDYFPEPVTVSWNSGALTSGVHTFPAVLQSSGLYSLSSVVTVPSSSLGTQTYICNVNHKPSNTKVDKKVEPKSCDKTHTCPPCPAPEAAGGPSVFLFPPKPKDTLMISRTPEVTCVVVSVSHEDPEVKFNWYVDGVEVHNAKTKPREEQYNSTYRVVSVLTVLHQDWLNGKEYKCKVSNKALPAPIEKTISKAKGQPREPQVYTLPPSREEMTKNQVSLSCAVKGFYPSDIAVEWESNGQPENNYKTTPPVLDSDGSFFLVSKLTVDKSRWQQGNVFSCSVMHEALHNRFTQKSLSLSPGK

SEQ ID NO: 983 - protein, 451 aa, Artificial Sequence; identical to SEQ ID NO: 980
  VB28B19 Heavy Chain 2

SEQ ID NO: 984 - protein, 445 aa, Artificial Sequence; identical to SEQ ID NO: 981
  VB28B20 Heavy Chain 2

SEQ ID NO: 985 - protein, 450 aa, Artificial Sequence; identical to SEQ ID NO: 982
  VB28B21 Heavy Chain 2

SEQ ID NO: 986 - protein, 476 aa, Artificial Sequence
  VB28B22 Heavy Chain 2
DIQMTQSPSSLSASVGDRVTITCRASQSISSYLNWYQQKPGCAPKLLIYAASSLQSGVPSRFSGSGSGTDFTLTISSLQPEDFATYYCQQSYSTPLTFGQGTKVEIKGGGSGGSGGCPPCGGSGGEVQLLESGGGLVQPGGSLRLSCAASGFTFSSYAMSWVRQAPGKGLEWVSAISGSGGSTYYADSVKGRFTISRDNSKNTLYLQMNSLRAEDTAVYYCAKYDGIYGELDFWGCGTLVTVSSEPKSSDKTHTCPPCPAPEAAGGPSVFLFPPKPKDTLMISRTPEVTCVVVSVSHEDPEVKFNWYVDGVEVHNAKTKPREEQYNSTYRVVSVLTVLHQDWLNGKEYKCKVSNKALPAPIEKTISKAKGQPREPQVYTLPPSREEMTKNQVSLSCAVKGFYPSDIAVEWESNGQPENNYKTTPPVLDSDGSFFLVSKLTVDKSRWQQGNVFSCSVMHEALHNHYTQKSLSLSPGK

SEQ ID NO: 987 - protein, 476 aa, Artificial Sequence; identical to SEQ ID NO: 986
  VB28B23 Heavy Chain 2

SEQ ID NO: 988 - protein, 476 aa, Artificial Sequence; identical to SEQ ID NO: 986
  VB28B24 Heavy Chain 2

SEQ ID NO: 989 - protein, 476 aa, Artificial Sequence; identical to SEQ ID NO: 986
  VB28B25 Heavy Chain 2

SEQ ID NO: 990 - protein, 476 aa, Artificial Sequence; identical to SEQ ID NO: 986
  VB28B26 Heavy Chain 2

SEQ ID NO: 991 - protein, 476 aa, Artificial Sequence; identical to SEQ ID NO: 986
  VB28B27 Heavy Chain 2

SEQ ID NO: 992 - protein, 451 aa, Artificial Sequence; identical to SEQ ID NO: 980
  VB28B29 Heavy Chain 2

SEQ ID NO: 993 - protein, 451 aa, Artificial Sequence; identical to SEQ ID NO: 980
  VB28B31 Heavy Chain 2

SEQ ID NO: 994 - protein, 451 aa, Artificial Sequence; identical to SEQ ID NO: 980
  VB28B32 Heavy Chain 2

SEQ ID NO: 995 - protein, 451 aa, Artificial Sequence; identical to SEQ ID NO: 980
  VB28B33 Heavy Chain 2

SEQ ID NO: 996 - protein, 451 aa, Artificial Sequence; identical to SEQ ID NO: 980
  VB28B35 Heavy Chain 2

SEQ ID NO: 997 - protein, 451 aa, Artificial Sequence; identical to SEQ ID NO: 980
  VB28B36 Heavy Chain 2

SEQ ID NO: 998 - protein, 451 aa, Artificial Sequence; identical to SEQ ID NO: 980
  VB28B38 Heavy Chain 2

SEQ ID NO: 999 - protein, 451 aa, Artificial Sequence; identical to SEQ ID NO: 980
  VB28B39 Heavy Chain 2

SEQ ID NO: 1000 - protein, 450 aa, Artificial Sequence; identical to SEQ ID NO: 982
  VB28B40 Heavy Chain 2

SEQ ID NO: 1001 - protein, 214 aa, Artificial Sequence; identical to SEQ ID NO: 903
  VB28B16 Light Chain 2

SEQ ID NO: 1002 - protein, 214 aa, Artificial Sequence; identical to SEQ ID NO: 905
  VB28B17 Light Chain 2

SEQ ID NO: 1003 - protein, 218 aa, Artificial Sequence; identical to SEQ ID NO: 18
  VB28B18 Light Chain 2

SEQ ID NO: 1004 - protein, 214 aa, Artificial Sequence; identical to SEQ ID NO: 903
  VB28B19 Light Chain 2

SEQ ID NO: 1005 - protein, 214 aa, Artificial Sequence; identical to SEQ ID NO: 905
  VB28B20 Light Chain 2

SEQ ID NO: 1006 - protein, 218 aa, Artificial Sequence; identical to SEQ ID NO: 18
  VB28B21 Light Chain 2

SEQ ID NO: 1007 - protein, 486 aa, Artificial Sequence
  VB28B29 Light Chain 2
DIQMTQSPSTLSASVGDRVTITCRASQSISSWLAWYQQKPGKAPKLLIYKASSLESGVPSRFSGSGSGTEFTLTISSLQPDDFATYYCQQYNSYSRTFGQGTKVEIKGGSEGKSSGSGSESKSTGGSQLQLQESGPGLVKPSETLSLTCTVSGASISSPSYYWGWIRQPPGKGLEWIGSIFYSGSSYYNPSLKSRVIMSVDTSKNQFSLKLSSVTAADTALYYCASQSGVSGWYGAEYFQHWGQGTLVTVSSGGSEGKSSGSGSESKSTGGSDIQMTQSPASLSASVGETVTITCGASENIYGSLNWYQRKQGKSPQLLIYGATNLADGMSSRFSGSGSGRQFSLKISSLHPDDVATYYCQNLLSTPYTFGGGTKLELKRTVAAPSVFIFPPSDEQLKSGTASVVCLLNNFYPREAKVQWKVDNALQSGNSQESVTEQDSKDSTYSLSSTLTLSKADYEKHKVYACEVTHQGLSSPVTKSFNRGEC

SEQ ID NO: 1008 - protein, 214 aa, Artificial Sequence; identical to SEQ ID NO: 903
  VB28B31 Light Chain 2

SEQ ID NO: 1009 - protein, 486 aa, Artificial Sequence
  VB28B32 Light Chain 2
DIQMTQSPSSLSASVGDRVTITCRSSQSLVHSSGNTYLHWYQQKPGKAPKFLIYKVSNRFSGVPSRFSGSGSGTDFTLTISSLQPEDFATYYCSQSTHVPFTFGQGTKLEIKGGSEGKSSGSGSESKSTGGSQVQLQESGPGLVKPSETLSLTCTVSGYSITSGYFWNWIRQPPGKGLEWIGYISYDGSNNYNPSLKSRVTISRDTSKNQFSLKLSSVTAADTAVYYCASPSPGTGYAVDYWGQGTLVTVSSGGSEGKSSGSGSESKSTGGSDIQMTQSPASLSASVGETVTITCGASENIYGSLNWYQRKQGKSPQLLIYGATNLADGMSSRFSGSGSGRQFSLKISSLHPDDVATYYCQNLLSTPYTFGGGTKLELKRTVAAPSVFIFPPSDEQLKSGTASVVCLLNNFYPREAKVQWKVDNALQSGNSQESVTEQDSKDSTYSLSSTLTLSKADYEKHKVYACEVTHQGLSSPVTKSFNRGEC

SEQ ID NO: 1010 - protein, 486 aa, Artificial Sequence; identical to SEQ ID NO: 1009
  VB28B33 Light Chain 2

SEQ ID NO: 1011 - protein, 486 aa, Artificial Sequence
  VB28B35 Light Chain 2
EIVLTQSPGTLSLSPGERATLSCRASQSISSSFLTWYQQKPGQAPRLLIYGASSRATGIPDRFSGGGSGTDFTLTISRLEPEDFAVYYCQHYGSSPMYTFGQGTKLEIKGGSEGKSSGSGSESKSTGGSEVQLLESGGGLVQPGGSLRLSCAASGFTFSSYAMSWVRQAPGKGLEWVSAISGSGGSTYYADSVKGRFTISRDNSKNTLYLQMNSLRAEDTAVYYCAKDEGYSSGHYYGMDVWGQGTTVTVSSGGSEGKSSGSGSESKSTGGSDIQMTQSPASLSASVGETVTITCGASENIYGSLNWYQRKQGKSPQLLIYGATNLADGMSSRFSGSGSGRQFSLKISSLHPDDVATYYCQNLLSTPYTFGGGTKLELKRTVAAPSVFIFPPSDEQLKSGTASVVCLLNNFYPREAKVQWKVDNALQSGNSQESVTEQDSKDSTYSLSSTLTLSKADYEKHKVYACEVTHQGLSSPVTKSFNRGEC

SEQ ID NO: 1012 - protein, 486 aa, Artificial Sequence; identical to SEQ ID NO: 1011
  VB28B36 Light Chain 2

SEQ ID NO: 1013 - protein, 214 aa, Artificial Sequence; identical to SEQ ID NO: 903
  VB28B38 Light Chain 2

SEQ ID NO: 1014 - protein, 486 aa, Artificial Sequence; identical to SEQ ID NO: 1009
  VB28B39 Light Chain 2

SEQ ID NO: 1015 - protein, 490 aa, Artificial Sequence
  VB28B40 Light Chain 2
EIVLTQSPGTLSLSPGERATLSCRASQSISSSFLTWYQQKPGQAPRLLIYGASSRATGIPDRFSGGGSGTDFTLTISRLEPEDFAVYYCQHYGSSPMYTFGQGTKLEIKGGSEGKSSGSGSESKSTGGSEVQLLESGGGLVQPGGSLRLSCAASGFTFSSYAMSWVRQAPGKGLEWVSAISGSGGSTYYADSVKGRFTISRDNSKNTLYLQMNSLRAEDTAVYYCAKDEGYSSGHYYGMDVWGQGTTVTVSSGGSEGKSSGSGSESKSTGGSDIVMTQSPDSLAVSLGERATINCRASQSVDYNGISYMHWYQQKPGQPPKLLIYAASNPESGVPDRFSGSGSGTDFTLTISSLQAEDVAVYYCQQIIEDPWTFGQGTKVEIKRTVAAPSVFIFPPSDEQLKSGTASVVCLLNNFYPREAKVQWKVDNALQSGNSQESVTEQDSKDSTYSLSSTLTLSKADYEKHKVYACEVTHQGLSSPVTKSFNRGEC

SEQ ID NO: 1016 - protein, 12 aa, Artificial Sequence
  VR000013096_PSMB410 HC AbM CDR1
GASISSPSYYWG

SEQ ID NO: 1017 - protein, 9 aa, Artificial Sequence
  VR000013096_PSMB410 HC AbM CDR2
SIFYSGSSY

SEQ ID NO: 1018 - protein, 15 aa, Artificial Sequence
  VR000013096_PSMB410 HC AbM CDR3
QSGVSGWYGAEYFQH

SEQ ID NO: 1019 - protein, 7 aa, Artificial Sequence
  VR000013096_PSMB410 HC KABAT CDR1
SPSYYWG

SEQ ID NO: 1020 - protein, 16 aa, Artificial Sequence
  VR000013096_PSMB410 HC KABAT CDR2
SIFYSGSSYYNPSLKS

SEQ ID NO: 1021 - protein, 15 aa, Artificial Sequence
  VR000013096_PSMB410 HC KABAT CDR3
QSGVSGWYGAEYFQH

SEQ ID NO: 1022 - protein, 9 aa, Artificial Sequence
  VR000013096_PSMB410 HC CHOTHIA CDR1
GASISSPSY

SEQ ID NO: 1023 - protein, 5 aa, Artificial Sequence
  VR000013096_PSMB410 HC CHOTHIA CDR2
FYSGS

SEQ ID NO: 1024 - protein, 15 aa, Artificial Sequence
  VR000013096_PSMB410 HC CHOTHIA CDR3
QSGVSGWYGAEYFQH

SEQ ID NO: 1025 - protein, 10 aa, Artificial Sequence
  VR000013096_PSMB410 HC IMGT CDR1
GASISSPSYY

SEQ ID NO: 1026 - protein, 7 aa, Artificial Sequence
  VR000013096_PSMB410 HC IMGT CDR2
IFYSGSS

SEQ ID NO: 1027 - protein, 17 aa, Artificial Sequence
  VR000013096_PSMB410 HC IMGT CDR3
ASQSGVSGWYGAEYFQH

SEQ ID NO: 1028 - protein, 8 aa, Artificial Sequence
  VR000013096_PSMB410 HC CONTACT CDR1
SSPSYYWG

SEQ ID NO: 1029 - protein, 12 aa, Artificial Sequence
  VR000013096_PSMB410 HC CONTACT CDR2
WIGSIFYSGSSY

SEQ ID NO: 1030 - protein, 16 aa, Artificial Sequence
  VR000013096_PSMB410 HC CONTACT CDR3
ASQSGVSGWYGAEYFQ

SEQ ID NO: 1031 - protein, 11 aa, Artificial Sequence
  VR000013096_PSMB410 LC AbM CDR1
RASQSISSWLA

SEQ ID NO: 1032 - protein, 7 aa, Artificial Sequence
  VR000013096_PSMB410 LC AbM CDR2
KASSLES

SEQ ID NO: 1033 - protein, 9 aa, Artificial Sequence
  VR000013096_PSMB410 LC AbM CDR3
QQYNSYSRT

SEQ ID NO: 1034 - protein, 11 aa, Artificial Sequence
  VR000013096_PSMB410 LC KABAT CDR1
RASQSISSWLA

SEQ ID NO: 1035 - protein, 7 aa, Artificial Sequence
  VR000013096_PSMB410 LC KABAT CDR2
KASSLES

SEQ ID NO: 1036 - protein, 9 aa, Artificial Sequence
  VR000013096_PSMB410 LC KABAT CDR3
QQYNSYSRT

SEQ ID NO: 1037 - protein, 11 aa, Artificial Sequence
  VR000013096_PSMB410 LC CHOTHIA CDR1
RASQSISSWLA

SEQ ID NO: 1038 - protein, 7 aa, Artificial Sequence
  VR000013096_PSMB410 LC CHOTHIA CDR2
KASSLES

SEQ ID NO: 1039 - protein, 9 aa, Artificial Sequence
  VR000013096_PSMB410 LC CHOTHIA CDR3
QQYNSYSRT

SEQ ID NO: 1040 - protein, 6 aa, Artificial Sequence
  VR000013096_PSMB410 LC IMGT CDR1
QSISSW

SEQ ID NO: 1041 - protein, 3 aa, Artificial Sequence
  VR000013096_PSMB410 LC IMGT CDR2
KAS

SEQ ID NO: 1042 - protein, 9 aa, Artificial Sequence
  VR000013096_PSMB410 LC IMGT CDR3
QQYNSYSRT

SEQ ID NO: 1043 - protein, 7 aa, Artificial Sequence
  VR000013096_PSMB410 LC CONTACT CDR1
SSWLAWY

SEQ ID NO: 1044 - protein, 10 aa, Artificial Sequence
  VR000013096_PSMB410 LC CONTACT CDR2
LLIYKASSLE

SEQ ID NO: 1045 - protein, 8 aa, Artificial Sequence
  VR000013096_PSMB410 LC CONTACT CDR3
QQYNSYSR

SEQ ID NO: 1046 - protein, 125 aa, Artificial Sequence
  VR000013096_PSMB410 VH
QLQLQESGPGLVKPSETLSLTCTVSGASISSPSYYWGWIRQPPGKGLEWIGSIFYSGSSYYNPSLKSRVIMSVDTSKNQFSLKLSSVTAADTALYYCASQSGVSGWYGAEYFQHWGQGTLVTVSS

SEQ ID NO: 1047 - protein, 107 aa, Artificial Sequence
  VR000013096_PSMB410 VL
DIQMTQSPSTLSASVGDRVTITCRASQSISSWLAWYQQKPGKAPKLLIYKASSLESGVPSRFSGSGSGTEFTLTISSLQPDDFATYYCQQYNSYSRTFGQGTKVEIK

SEQ ID NO: 1048 - protein, 484 aa, Artificial Sequence; identical to SEQ ID NO: 960
  VB28B28 Heavy Chain 1

SEQ ID NO: 1049 - protein, 483 aa, Artificial Sequence
  B17B619 Heavy Chain 2
EIVLTQSPGTLSLSPGERATLSCRASQSISSSFLTWYQQKPGQAPRLLIYGASSRATGIPDRFSGGGSGTDFTLTISRLEPEDFAVYYCQHYGSSPMYTFGQGTKLEIKGGSEGKSSGSGSESKSTGGSEVQLLESGGGLVQPGGSLRLSCAASGFTFSSYAMSWVRQAPGKGLEWVSAISGSGGSTYYADSVKGRFTISRDNSKNTLYLQMNSLRAEDTAVYYCAKDEGYSSGHYYGMDVWGQGTTVTVSSEPKSSDKTHTCPPCPAPEAAGGPSVFLFPPKPKDTLMISRTPEVTCVVVSVSHEDPEVKFNWYVDGVEVHNAKTKPREEQYNSTYRVVSVLTVLHQDWLNGKEYKCKVSNKALPAPIEKTISKAKGQPREPQVYVLPPSREEMTKNQVSLLCLVKGFYPSDIAVEWESNGQPENNYLTWPPVLDSDGSFFLYSKLTVDKSRWQQGNVFSCSVMHEALHNHYTQKSLSLSPG

SEQ ID NO: 1050 - protein, 451 aa, Artificial Sequence; identical to SEQ ID NO: 980
  VB28B28 Heavy Chain 2

SEQ ID NO: 1051 - protein, 486 aa, Artificial Sequence; identical to SEQ ID NO: 1007
  VB28B28 Light Chain 2

SEQ ID NO: 1052 - protein, 123 aa, Artificial Sequence; identical to SEQ ID NO: 95
  VR000003260_BCMB519 VH

SEQ ID NO: 1053 - protein, 109 aa, Artificial Sequence; identical to SEQ ID NO: 96
  VR000003260_BCMB519 VL

SEQ ID NO: 1054 - protein, 11 aa, Artificial Sequence
  VR000015623_B17B21  HC AbM CDR1
GYSITSGYFWN

SEQ ID NO: 1055 - protein, 9 aa, Artificial Sequence
  VR000015623_B17B21  HC AbM CDR2
YISYDGSNN

SEQ ID NO: 1056 - protein, 11 aa, Artificial Sequence
  VR000015623_B17B21  HC AbM CDR3
PSPGTGYAVDY

SEQ ID NO: 1057 - protein, 6 aa, Artificial Sequence
  VR000015623_B17B21  HC KABAT CDR1
SGYFWN

SEQ ID NO: 1058 - protein, 16 aa, Artificial Sequence
  VR000015623_B17B21  HC KABAT CDR2
YISYDGSNNYNPSLKS

SEQ ID NO: 1059 - protein, 11 aa, Artificial Sequence
  VR000015623_B17B21  HC KABAT CDR3
PSPGTGYAVDY

SEQ ID NO: 1060 - protein, 8 aa, Artificial Sequence
  VR000015623_B17B21  HC CHOTHIA CDR1
GYSITSGY

SEQ ID NO: 1061 - protein, 5 aa, Artificial Sequence
  VR000015623_B17B21  HC CHOTHIA CDR2
SYDGS

SEQ ID NO: 1062 - protein, 11 aa, Artificial Sequence
  VR000015623_B17B21  HC CHOTHIA CDR3
PSPGTGYAVDY

SEQ ID NO: 1063 - protein, 9 aa, Artificial Sequence
  VR000015623_B17B21  HC IMGT CDR1
GYSITSGYF

SEQ ID NO: 1064 - protein, 7 aa, Artificial Sequence
  VR000015623_B17B21  HC IMGT CDR2
ISYDGSN

SEQ ID NO: 1065 - protein, 13 aa, Artificial Sequence
  VR000015623_B17B21  HC IMGT CDR3
ASPSPGTGYAVDY

SEQ ID NO: 1066 - protein, 7 aa, Artificial Sequence
  VR000015623_B17B21  HC CONTACT CDR1
TSGYFWN

SEQ ID NO: 1067 - protein, 12 aa, Artificial Sequence
  VR000015623_B17B21  HC CONTACT CDR2
WIGYISYDGSNN

SEQ ID NO: 1068 - protein, 12 aa, Artificial Sequence
  VR000015623_B17B21  HC CONTACT CDR3
ASPSPGTGYAVD

SEQ ID NO: 1069 - protein, 16 aa, Artificial Sequence
  VR000015623_B17B21  LC AbM CDR1
RSSQSLVHSSGNTYLH

SEQ ID NO: 1070 - protein, 7 aa, Artificial Sequence
  VR000015623_B17B21  LC AbM CDR2
KVSNRFS

SEQ ID NO: 1071 - protein, 9 aa, Artificial Sequence
  VR000015623_B17B21  LC AbM CDR3
SQSTHVPFT

SEQ ID NO: 1072 - protein, 16 aa, Artificial Sequence
  VR000015623_B17B21  LC KABAT CDR1
RSSQSLVHSSGNTYLH

SEQ ID NO: 1073 - protein, 7 aa, Artificial Sequence
  VR000015623_B17B21  LC KABAT CDR2
KVSNRFS

SEQ ID NO: 1074 - protein, 9 aa, Artificial Sequence
  VR000015623_B17B21  LC KABAT CDR3
SQSTHVPFT

SEQ ID NO: 1075 - protein, 16 aa, Artificial Sequence
  VR000015623_B17B21  LC CHOTHIA CDR1
RSSQSLVHSSGNTYLH

SEQ ID NO: 1076 - protein, 7 aa, Artificial Sequence
  VR000015623_B17B21  LC CHOTHIA CDR2
KVSNRFS

SEQ ID NO: 1077 - protein, 9 aa, Artificial Sequence
  VR000015623_B17B21  LC CHOTHIA CDR3
SQSTHVPFT

SEQ ID NO: 1078 - protein, 11 aa, Artificial Sequence
  VR000015623_B17B21  LC IMGT CDR1
QSLVHSSGNTY

SEQ ID NO: 1079 - protein, 3 aa, Artificial Sequence
  VR000015623_B17B21  LC IMGT CDR2
KVS

SEQ ID NO: 1080 - protein, 9 aa, Artificial Sequence
  VR000015623_B17B21  LC IMGT CDR3
SQSTHVPFT

SEQ ID NO: 1081 - protein, 12 aa, Artificial Sequence
  VR000015623_B17B21  LC CONTACT CDR1
VHSSGNTYLHWY

SEQ ID NO: 1082 - protein, 10 aa, Artificial Sequence
  VR000015623_B17B21  LC CONTACT CDR2
FLIYKVSNRF

SEQ ID NO: 1083 - protein, 8 aa, Artificial Sequence
  VR000015623_B17B21  LC CONTACT CDR3
SQSTHVPF

SEQ ID NO: 1084 - protein, 120 aa, Artificial Sequence; identical to SEQ ID NO: 21
  VR000015623_B17B21  VH

SEQ ID NO: 1085 - protein, 112 aa, Artificial Sequence; identical to SEQ ID NO: 677
  VR000015623_B17B21  VL

1. A trispecific antibody comprising: (a) a first binding domain that binds to Vβ17, (b) a second binding domain that binds to cancer antigen, and (c) a third binding domain that binds to CD28;
wherein optionally the cancer antigen is BCMA, or
wherein optionally the cancer antigen is PSMA.

2. The trispecific antibody of claim 1, wherein:
(a) the first binding domain that binds to Vβ17 comprises:
(1) (i) a VH comprising a VH CDR1, a VH CDR2, and a VH CDR3 having an amino acid sequence of a VH CDR1, VH CDR2, and VH CDR3, respectively, of SEQ ID NO:9; and (ii) a VL comprising a VL CDR1, a VL CDR2, and a VL CDR3 having an amino acid sequence of a VL CDR1, VL CDR2, and VL CDR3, respectively, of SEQ ID NO:10;
(2) (i) a VH comprising a VH CDR1, a VH CDR2, and a VH CDR3 having an amino acid sequence of a VH CDR1, VH CDR2, and VH CDR3, respectively, of SEQ ID NO:19; and (ii) a VL comprising a VL CDR1, a VL CDR2, and a VL CDR3 having an amino acid sequence of a VL CDR1, VL CDR2, and VL CDR3, respectively, of SEQ ID NO:22;
(3) (i) a VH comprising a VH CDR1, a VH CDR2, and a VH CDR3 having an amino acid sequence of a VH CDR1, VH CDR2, and VH CDR3, respectively, of SEQ ID NO:19; and (ii) a VL comprising a VL CDR1, a VL CDR2, and a VL CDR3 having an amino acid sequence of a VL CDR1, VL CDR2, and VL CDR3, respectively, of SEQ ID NO:23;
(4) (i) a VH comprising a VH CDR1, a VH CDR2, and a VH CDR3 having an amino acid sequence of a VH CDR1, VH CDR2, and VH CDR3, respectively, of SEQ ID NO:19; and (ii) a VL comprising a VL CDR1, a VL CDR2, and a VL CDR3 having an amino acid sequence of a VL CDR1, VL CDR2, and VL CDR3, respectively, of SEQ ID NO:24;
(5) (i) a VH comprising a VH CDR1, a VH CDR2, and a VH CDR3 having an amino acid sequence of a VH CDR1, VH CDR2, and VH CDR3, respectively, of SEQ ID NO:20; and (ii) a VL comprising a VL CDR1, a VL CDR2, and a VL CDR3 having an amino acid sequence of a VL CDR1, VL CDR2, and VL CDR3, respectively, of SEQ ID NO:22;
(6) (i) a VH comprising a VH CDR1, a VH CDR2, and a VH CDR3 having an amino acid sequence of a VH CDR1, VH CDR2, and VH CDR3, respectively, of SEQ ID NO:20; and (ii) a VL comprising a VL CDR1, a VL CDR2, and a VL CDR3 having an amino acid sequence of a VL CDR1, VL CDR2, and VL CDR3, respectively, of SEQ ID NO:23;
(7) (i) a VH comprising a VH CDR1, a VH CDR2, and a VH CDR3 having an amino acid sequence of a VH CDR1, VH CDR2, and VH CDR3, respectively, of SEQ ID NO:20; and (ii) a VL comprising a VL CDR1, a VL CDR2, and a VL CDR3 having an amino acid sequence of a VL CDR1, VL CDR2, and VL CDR3, respectively, of SEQ ID NO:24;
(8) (i) a VH comprising a VH CDR1, a VH CDR2, and a VH CDR3 having an amino acid sequence of a VH CDR1, VH CDR2, and VH CDR3, respectively, of SEQ ID NO:21; and (ii) a VL comprising a VL CDR1, a VL CDR2, and a VL CDR3 having an amino acid sequence of a VL CDR1, VL CDR2, and VL CDR3, respectively, of SEQ ID NO:22;
(9) (i) a VH comprising a VH CDR1, a VH CDR2, and a VH CDR3 having an amino acid sequence of a VH CDR1, VH CDR2, and VH CDR3, respectively, of SEQ ID NO:21; and (ii) a VL comprising a VL CDR1, a VL CDR2, and a VL CDR3 having an amino acid sequence of a VL CDR1, VL CDR2, and VL CDR3, respectively, of SEQ ID NO:23;
(10) (i) a VH comprising a VH CDR1, a VH CDR2, and a VH CDR3 having an amino acid sequence of a VH CDR1, VH CDR2, and VH CDR3, respectively, of SEQ ID NO:21; and (ii) a VL comprising a VL CDR1, a VL CDR2, and a VL CDR3 having an amino acid sequence of a VL CDR1, VL CDR2, and VL CDR3, respectively, of SEQ ID NO:24;
(11) (i) a VH comprising a VH CDR1, a VH CDR2, and a VH CDR3 having an amino acid sequence of a VH CDR1, VH CDR2, and VH CDR3, respectively, of SEQ ID NO:46; and (ii) a VL comprising a VL CDR1, a VL CDR2, and a VL CDR3 having an amino acid sequence of a VL CDR1, VL CDR2, and VL CDR3, respectively, of SEQ ID NO:49;
(12) (i) a VH comprising a VH CDR1, a VH CDR2, and a VH CDR3 having an amino acid sequence of a VH CDR1, VH CDR2, and VH CDR3, respectively, of SEQ ID NO:77; and (ii) a VL comprising a VL CDR1, a VL CDR2, and a VL CDR3 having an amino acid sequence of a VL CDR1, VL CDR2, and VL CDR3, respectively, of SEQ ID NO:78;
(13) (i) a VH comprising a VH CDR1, a VH CDR2, and a VH CDR3 having an amino acid sequence of a VH CDR1, VH CDR2, and VH CDR3, respectively, of SEQ ID NO:79; and (ii) a VL comprising a VL CDR1, a VL CDR2, and a VL CDR3 having an amino acid sequence of a VL CDR1, VL CDR2, and VL CDR3, respectively, of SEQ ID NO:80;
(14) (i) a VH comprising a VH CDR1, a VH CDR2, and a VH CDR3 having an amino acid sequence of a VH CDR1, VH CDR2, and VH CDR3, respectively, of SEQ ID NO:81; and (ii) a VL comprising a VL CDR1, a VL CDR2, and a VL CDR3 having an amino acid sequence of a VL CDR1, VL CDR2, and VL CDR3, respectively, of SEQ ID NO:82;
(15) (i) a VH comprising a VH CDR1, a VH CDR2, and a VH CDR3 having an amino acid sequence of a VH CDR1, VH CDR2, and VH CDR3, respectively, of SEQ ID NO:83; and (ii) a VL comprising a VL CDR1, a VL CDR2, and a VL CDR3 having an amino acid sequence of a VL CDR1, VL CDR2, and VL CDR3, respectively, of SEQ ID NO:84;
(16) (i) a VH comprising a VH CDR1, a VH CDR2, and a VH CDR3 having an amino acid sequence of a VH CDR1, VH CDR2, and VH CDR3, respectively, of SEQ ID NO:85; and (ii) a VL comprising a VL CDR1, a VL CDR2, and a VL CDR3 having an amino acid sequence of a VL CDR1, VL CDR2, and VL CDR3, respectively, of SEQ ID NO:86;
(17) (i) a VH comprising a VH CDR1, a VH CDR2, and a VH CDR3 having an amino acid sequence of a VH CDR1, VH CDR2, and VH CDR3, respectively, of SEQ ID NO:87; and (ii) a VL comprising a VL CDR1, a VL CDR2, and a VL CDR3 having an amino acid sequence of a VL CDR1, VL CDR2, and VL CDR3, respectively, of SEQ ID NO:88;
(18) (i) a VH comprising a VH CDR1, a VH CDR2, and a VH CDR3 having an amino acid sequence of a VH CDR1, VH CDR2, and VH CDR3, respectively, of SEQ ID NO:21; and (ii) a VL comprising a VL CDR1, a VL CDR2, and a VL CDR3 having an amino acid sequence of a VL CDR1, VL CDR2, and VL CDR3, respectively, of SEQ ID NO:665; or
(19) (i) a VH comprising a VH CDR1, a VH CDR2, and a VH CDR3 having an amino acid sequence of a VH CDR1, VH CDR2, and VH CDR3, respectively, of SEQ ID NO:1084; and (ii) a VL comprising a VL CDR1, a VL CDR2, and a VL CDR3 having an amino acid sequence of a VL CDR1, VL CDR2, and VL CDR3, respectively, of SEQ ID NO:1085;
(b) the cancer antigen is BCMA; optionally wherein the second binding domain that binds to BCMA comprises:
(1) (i) a VH comprising a VH CDR1, a VH CDR2, and a VH CDR3 having an amino acid sequence of a VH CDR1, VH CDR2, and VH CDR3, respectively, of SEQ ID NO:95; and (ii) a VL comprising a VL CDR1, a VL CDR2, and a VL CDR3 having an amino acid sequence of a VL CDR1, VL CDR2, and VL CDR3, respectively, of SEQ ID NO:96;
(2) (i) a VH comprising a VH CDR1, a VH CDR2, and a VH CDR3 having an amino acid sequence of a VH CDR1, VH CDR2, and VH CDR3, respectively, of SEQ ID NO:1052; and (ii) a VL comprising a VL CDR1, a VL CDR2, and a VL CDR3 having an amino acid sequence of a VL CDR1, VL CDR2, and VL CDR3, respectively, of SEQ ID NO:1053; or
(c) the cancer antigen is PSMA; optionally wherein the second binding domain that binds to PSMA comprises:
(1) a VH comprising a VH CDR1, a VH CDR2, and a VH CDR3 having an amino acid sequence of a VH CDR1, VH CDR2, and VH CDR3, respectively, of SEQ ID NO:1046; and (ii) a VL comprising a VL CDR1, a VL CDR2, and a VL CDR3 having an amino acid sequence of a VL CDR1, VL CDR2, and VL CDR3, respectively, of SEQ ID NO:1047; or
(d) the third binding domain that binds to CD28 comprises:
(1) (i) a VH comprising a VH CDR1, a VH CDR2, and a VH CDR3 having an amino acid sequence of a VH CDR1, VH CDR2, and VH CDR3, respectively, of SEQ ID NO:690; and (ii) a VL comprising a VL CDR1, a VL CDR2, and a VL CDR3 having an amino acid sequence of a VL CDR1, VL CDR2, and VL CDR3, respectively, of SEQ ID NO:696;
(2) (i) a VH comprising a VH CDR1, a VH CDR2, and a VH CDR3 having an amino acid sequence of a VH CDR1, VH CDR2, and VH CDR3, respectively, of SEQ ID NO:691; and (ii) a VL comprising a VL CDR1, a VL CDR2, and a VL CDR3 having an amino acid sequence of a VL CDR1, VL CDR2, and VL CDR3, respectively, of SEQ ID NO:697;
(3) (i) a VH comprising a VH CDR1, a VH CDR2, and a VH CDR3 having an amino acid sequence of a VH CDR1, VH CDR2, and VH CDR3, respectively, of SEQ ID NO:692; and (ii) a VL comprising a VL CDR1, a VL CDR2, and a VL CDR3 having an amino acid sequence of a VL CDR1, VL CDR2, and VL CDR3, respectively, of SEQ ID NO:698; or
(4) (i) a VH comprising a VH CDR1, a VH CDR2, and a VH CDR3 having an amino acid sequence of a VH CDR1, VH CDR2, and VH CDR3, respectively, of SEQ ID NO:693; and (ii) a VL comprising a VL CDR1, a VL CDR2, and a VL CDR3 having an amino acid sequence of a VL CDR1, VL CDR2, and VL CDR3, respectively, of SEQ ID NO:699.

3. The trispecific antibody of claim 2, wherein
i. the VH CDR1, VH CDR2, VH CDR3, VL CDR1, VL CDR2, and VL CDR3 amino acid sequences of the first, second, or third binding domain are according to the Kabat numbering system;
ii. the VH CDR1, VH CDR2, VH CDR3, VL CDR1, VL CDR2, and VL CDR3 amino acid sequences of the first, second, or third binding domain are according to the Chothia numbering system;
iii. the VH CDR1, VH CDR2, VH CDR3, VL CDR1, VL CDR2, and VL CDR3 amino acid sequences of the first, second, or third binding domain are according to the AbM numbering system;
iv. the VH CDR1, VH CDR2, VH CDR3, VL CDR1, VL CDR2, and VL CDR3 amino acid sequences of the first, second, or third binding domain are according to the Contact numbering system;
v. the VH CDR1, VH CDR2, VH CDR3, VL CDR1, VL CDR2, and VL CDR3 amino acid sequences of the first, second, or third binding domain are according to the IMGT numbering system; or
vi. the VH CDR1, VH CDR2, VH CDR3, VL CDR1, VL CDR2, and VL CDR3 amino acid sequences of the first, second, or third binding domain are according to the Exemplary numbering system.

4. The trispecific antibody of claim 1, wherein the first binding domain:
(1) binds to Vβ17 that is present on the surface of a T cell;
(2) binds to a Vβ17 antigen;
(3) to a Vβ17 epitope; or
(4) specifically binds to a Vβ17 antigen.

5. The trispecific antibody of claim 1, wherein the cancer antigen is:
(1) present on the surface of a cell;
(2) BCMA, wherein optionally, the BCMA is present on the surface of a B cell;
or
(3) PSMA, wherein optionally, the PSMA is present on the surface of a prostate cell.

6.-13. (canceled)

14. The trispecific antibody of claim 1, wherein the third binding domain:
(a) binds to CD28 that is present on the surface of a T cell;
(b) binds an antigen of CD28;
(2) binds an epitope of CD28; or
(3) specifically binds to CD28.

15. (canceled)

16. (canceled)

17. The trispecific antibody of claim 1, wherein
i. the first binding domain is humanized,
ii. the second binding domain is humanized,
iii. the third binding domain is humanized,
iv. the first binding domain and second binding domain are humanized,
v. the first binding domain and third binding domain are humanized,
vi. the second binding domain and third binding domain are humanized, or
vii. the first binding domain, the second binding domain and the third binding domain are humanized.

18. The trispecific antibody of claim 1, wherein the trispecific antibody:
(1) is an IgG antibody, wherein optionally, the IgG antibody is an IgG1, IgG2, IgG3, or IgG4;
(2) comprises a kappa light chain;
(3) comprises a lambda light chain;
(4) is multivalent.

19.-42. (canceled)

43. A trispecific antibody comprising: a first means capable of binding Vβ17 on the surface of a T cell; a second means capable of binding a cancer antigen on the surface of a cancer cell; and a third means capable of binding CD28 on the surface of the T cell;
wherein optionally, the cancer antigen is BCMA and the cancer cell is a B cell cancer cell, or
wherein optionally, the cancer antigen is PSMA and the cancer cell is a prostate cancer cell.

44. (canceled)

45. (canceled)

46. A nucleic acid encoding the trispecific antibody of claim 1.

47. A vector comprising the nucleic acid of claim 46.

48. A host cell comprising the vector of claim 47.

49. A kit comprising the vector of claim 47 and packaging for the same.

50. A kit comprising the trispecific antibody of claim 1 and packaging for the same.

51. A pharmaceutical composition comprising the trispecific antibody of claim 1, and a pharmaceutically acceptable carrier.

52. A method of producing the pharmaceutical composition of claim 51, comprising combining the trispecific antibody with a pharmaceutically acceptable carrier to obtain the pharmaceutical composition.

53. A method of:
(1) activating a T cell expressing Vβ17, comprising contacting the T cell with the trispecific antibody of claim 1;
(2) directing a T cell expressing Vβ17 and CD28 to a B cell, the method comprising contacting the T cell with the trispecific antibody of claim 1, wherein the contacting directs the T cell to the B cell;
(3) inhibiting growth or proliferation of B cells expressing BCMA on the cell surface, the method comprising contacting the B cells with the trispecific antibody of claim 1, wherein contacting the B cells with the pharmaceutical composition or the antibody or the trispecific antibody inhibits growth or proliferation of the B cells;
wherein:
(a) the B cells are in the presence of a T cell expressing Vβ17 while in contact with the trispecific antibody; or
(b) the B cells are in the presence of a T cell expressing CD28 while in contact with the trispecific antibody;
(4) directing a T cell expressing Vβ17 to a cancer cell, the method comprising contacting the T cell with the trispecific antibody of claim 1, wherein the contacting directs the T cell to the cancer cell;
(5) inhibiting the growth or proliferation of a cancer cell, comprising contacting the trispecific antibody of claim 1, with the cancer cell having the cancer antigen present on the surface of the cancer cell, wherein the contacting is in the presence of a T cell expressing the Vβ17, and wherein the contacting results in the inhibition of the growth or proliferation of the cancer cell;
(6) eliminating a cancer cell in a subject, comprising contacting the trispecific antibody of claim 1 with the cancer cell having the cancer antigen present on the surface of the cancer cell, wherein the contacting is in the presence of a T cell expressing the Vβ17, and wherein the contacting results in the elimination of the cancer cell; wherein optionally, the subject is a human or wherein optionally, the subject is a subject in need thereof; or
(7) treating a disease in a subject, comprising administering an effective amount of the trispecific antibody of claim 1 to the subject, wherein the disease is caused all or in part by a cancer cell having the cancer antigen present on the surface of the cancer cell; wherein optionally, the subject is a human or wherein optionally, the subject is a subject in need thereof.

54. A process for making an antibody that binds to more than one target molecule, the process comprising:
a step for performing a function of obtaining a first binding domain capable of binding to Vβ17 on a T cell; a step for performing a function of obtaining a second binding domain capable of binding to cancer antigen on a cancer cell; a step for performing a function of obtaining a third binding domain capable of binding to CD28 on a T cell; and a step for performing a function of providing an antibody capable of binding to a Vβ17 antigen on the T cell, a cancer antigen on the cancer cell and the CD28 antigen on the T cell;
wherein (i) the step for performing a function of obtaining a second binding domain that binds to the cancer antigen on the cancer cell is repeated n times, and further comprising n steps for performing a function of providing a first binding domain that binds to Vβ17 present on a T cell and n number of target molecules, wherein n is at least 2, or (ii) the step for performing a function of obtaining a third binding domain that binds to the CD28 on the T cell is repeated n times, and further comprising n steps for performing a function of providing a first binding domain that binds to Vβ17 present on a T cell and n number of target molecules, wherein n is at least 2.

55. (canceled)

56. A method of directing a T cell expressing Vβ17 and CD28 to a B cell, the method comprising contacting the T cell with the trispecific antibody of claim 1, wherein the contacting directs the T cell to the B cell.

57.-65. (canceled)

66. The method of claim 56, wherein the cancer antigen is present on the surface of a cancer cell.

67. The method of claim 66, wherein
(i) the cancer cell is a cell of an adrenal cancer, anal cancer, appendix cancer, bile duct cancer, bladder cancer, bone cancer, brain cancer, breast cancer, cervical cancer, colorectal cancer, esophageal cancer, gallbladder cancer, gestational trophoblastic, head and neck cancer, Hodgkin lymphoma, intestinal cancer, kidney cancer, leukemia, liver cancer, lung cancer, melanoma, mesothelioma, multiple myeloma, neuroendocrine tumor, non-Hodgkin lymphoma, oral cancer, ovarian cancer, pancreatic cancer, prostate cancer, sinus cancer, skin cancer, soft tissue sarcoma spinal cancer, stomach cancer, testicular cancer, throat cancer, thyroid cancer, uterine cancer endometrial cancer, vaginal cancer, or vulvar cancer; wherein
(i) the adrenal cancer is an adrenocortical carcinoma (ACC), adrenal cortex cancer, pheochromocytoma, or neuroblastoma;
(ii) the anal cancer is a squamous cell carcinoma, cloacogenic carcinoma, adenocarcinoma, basal cell carcinoma, or melanoma;
(iii) the appendix cancer is a neuroendocrine tumor (NET), mucinous adenocarcinoma, goblet cell carcinoid, intestinal-type adenocarcinoma, or signet-ring cell adenocarcinoma;
(iv) the bile duct cancer is an extrahepatic bile duct cancer, adenocarcinomas, hilar bile duct cancer, perihilar bile duct cancer, distal bile duct cancer, or intrahepatic bile duct cancer;
(v) the bladder cancer is transitional cell carcinoma (TCC), papillary carcinoma, flat carcinoma, squamous cell carcinoma, adenocarcinoma, small-cell carcinoma, or sarcoma;
(vi) the bone cancer is a primary bone cancer, sarcoma, osteosarcoma, chondrosarcoma, sarcoma, fibrosarcoma, malignant fibrous histiocytoma, giant cell tumor of bone, chordoma, or metastatic bone cancer;
(vii) the brain cancer is an astrocytoma, brain stem glioma, glioblastoma, meningioma, ependymoma, oligodendroglioma, mixed glioma, pituitary carcinoma, pituitary adenoma, craniopharyngioma, germ cell tumor, pineal region tumor, medulloblastoma, or primary CNS lymphoma;
(viii) the breast cancer is a breast adenocarcinoma, invasive breast cancer, noninvasive breast cancer, breast sarcoma, metaplastic carcinoma, adenocystic carcinoma, phyllodes tumor, angiosarcoma, HER2-positive breast cancer, triple-negative breast cancer, or inflammatory breast cancer;
(ix) the cervical cancer is a squamous cell carcinoma, or adenocarcinoma;
(x) the colorectal cancer is a colorectal adenocarcinoma, primary colorectal lymphoma, gastrointestinal stromal tumor, leiomyosarcoma, carcinoid tumor, mucinous adenocarcinoma, signet ring cell adenocarcinoma, gastrointestinal carcinoid tumor, or melanoma;
(xi) the esophageal cancer is an adenocarcinoma or squamous cell carcinoma;
(xii) the gall bladder cancer is an adenocarcinoma, papillary adenocarcinoma, adenosquamous carcinoma, squamous cell carcinoma, small cell carcinoma, or sarcoma;
(xiii) the gestational trophoblastic disease (GTD) is a hydatidiform mole, gestational trophoblastic neoplasia (GTN), choriocarcinoma, placental-site trophoblastic tumor (PSTT), or epithelioid trophoblastic tumor (ETT);
(xiv) the head and neck cancer is a laryngeal cancer, nasopharyngeal cancer, hypopharyngeal cancer, nasal cavity cancer, paranasal sinus cancer, salivary gland cancer, oral cancer, oropharyngeal cancer, or tonsil cancer;
(xv) the Hodgkin lymphoma is a classical Hodgkin lymphoma, nodular sclerosis, mixed cellularity, lymphocyte-rich, lymphocyte-depleted, or nodular lymphocyte-predominant Hodgkin lymphoma (NLPHL);
(xvi) the intestinal cancer is a small intestine cancer, small bowel cancer, adenocarcinoma, sarcoma, gastrointestinal stromal tumors, carcinoid tumors, or lymphoma;
(xvii) the kidney cancer is a renal cell carcinoma (RCC), clear cell RCC, papillary RCC, chromophobe RCC, collecting duct RCC, unclassified RCC, transitional cell carcinoma, urothelial cancer, renal pelvis carcinoma, or renal sarcoma;
(xviii) the leukemia is an acute lymphocytic leukemia (ALL), acute myeloid leukemia (AML), chronic lymphocytic leukemia (CLL), chronic myeloid leukemia (CML), hairy cell leukemia (HCL), or a myelodysplastic syndrome (MDS);
(xix) the liver cancer is a hepatocellular carcinoma (HCC), fibrolamellar HCC, cholangiocarcinoma, angiosarcoma, or liver metastasis;
(xx) the lung cancer is a small cell lung cancer, small cell carcinoma, combined small cell carcinoma, non-small cell lung cancer, lung adenocarcinoma, squamous cell lung cancer, large-cell undifferentiated carcinoma, pulmonary nodule, metastatic lung cancer, adenosquamous carcinoma, large cell neuroendocrine carcinoma, salivary gland-type lung carcinoma, lung carcinoid, mesothelioma, sarcomatoid carcinoma of the lung, or malignant granular cell lung tumor;
(xxi) the melanoma is a superficial spreading melanoma, nodular melanoma, acral-lentiginous melanoma, lentigo maligna melanoma, amelanotic melanoma, desmoplastic melanoma, ocular melanoma, or metastatic melanoma;
(xxii) the mesothelioma is a pleural mesothelioma, peritoneal mesothelioma, pericardial mesothelioma, or testicular mesothelioma;
(xxiii) the multiple myeloma is an active myeloma or smoldering myeloma;
(xxiv) the neuroendocrine tumor, is a gastrointestinal neuroendocrine tumor, pancreatic neuroendocrine tumor, or lung neuroendocrine tumor;
(xxv) the non-Hodgkin's lymphoma is an anaplastic large-cell lymphoma, lymphoblastic lymphoma, peripheral T cell lymphoma, follicular lymphoma, cutaneous T cell lymphoma, lymphoplasmacytic lymphoma, marginal zone B-cell lymphoma, MALT lymphoma, small-cell lymphocytic lymphoma, Burkitt lymphoma, chronic lymphocytic leukemia (CLL), small lymphocytic lymphoma (SLL), precursor T-lymphoblastic leukemia/lymphoma, acute lymphocytic leukemia (ALL), adult T cell lymphoma/leukemia (ATLL), hairy cell leukemia, B-cell lymphomas, diffuse large B-cell lymphoma (DLBCL), primary mediastinal B-cell lymphoma, primary central nervous system (CNS) lymphoma, mantle cell lymphoma (MCL), marginal zone lymphomas, mucosa-associated lymphoid tissue (MALT) lymphoma, nodal marginal zone B-cell lymphoma, splenic marginal zone B-cell lymphoma, lymphoplasmacytic lymphoma, B-cell non-Hodgkin lymphoma, T cell non-Hodgkin lymphoma, natural killer cell lymphoma, cutaneous T cell lymphoma, Alibert-Bazin syndrome, Sezary syndrome, primary cutaneous anaplastic large-cell lymphoma, peripheral T cell lymphoma, angioimmunoblastic T cell lymphoma (AITL), anaplastic large-cell lymphoma (ALCL), systemic ALCL, enteropathy-type T cell lymphoma (EATL), or hepatosplenic gamma/delta T cell lymphoma;
(xxvi) the oral cancer is a squamous cell carcinoma, verrucous carcinoma, minor salivary gland carcinomas, lymphoma, benign oral cavity tumor, eosinophilic granuloma, fibroma, granular cell tumor, karatoacanthoma, leiomyoma, osteochondroma, lipoma, schwannoma, neurofibroma, papilloma, condyloma acuminatum, verruciform xanthoma, pyogenic granuloma, rhabdomyoma, odontogenic tumors, leukoplakia, erythroplakia, squamous cell lip cancer, basal cell lip cancer, mouth cancer, gum cancer, or tongue cancer;
(xxvii) the ovarian cancer is a ovarian epithelial cancer, mucinous epithelial ovarian cancer, endometrioid epithelial ovarian cancer, clear cell epithelial ovarian cancer, undifferentiated epithelial ovarian cancer, ovarian low malignant potential tumors, primary peritoneal carcinoma, fallopian tube cancer, germ cell tumors, teratoma, dysgerminoma ovarian germ cell cancer, endodermal sinus tumor, sex cord-stromal tumors, sex cord-gonadal stromal tumor, ovarian stromal tumor, granulosa cell tumor, granulosa-theca tumor, Sertoli-Leydig tumor, ovarian sarcoma, ovarian carcinosarcoma, ovarian adenosarcoma, ovarian leiomyosarcoma, ovarian fibrosarcoma, Krukenberg tumor, or ovarian cyst;
(xxviii) the pancreatic cancer is a pancreatic exocrine gland cancer, pancreatic endocrine gland cancer, or pancreatic adenocarcinoma, islet cell tumor, or neuroendocrine tumor;
(xxix) the prostate cancer is a prostate adenocarcinoma, prostate sarcoma, transitional cell carcinoma, small cell carcinoma, or neuroendocrine tumor;
(xxx) the sinus cancer is a squamous cell carcinoma, mucosa cell carcinoma, adenoid cystic cell carcinoma, acinic cell carcinoma, sinonasal undifferentiated carcinoma, nasal cavity cancer, paranasal sinus cancer, maxillary sinus cancer, ethmoid sinus cancer, or nasopharynx cancer;
(xxxi) the skin cancer is a basal cell carcinoma, squamous cell carcinoma, melanoma, Merkel cell carcinoma, Kaposi sarcoma (KS), actinic keratosis, skin lymphoma, or keratoacanthoma;
(xxxii) the soft tissue cancer is an angiosarcoma, dermatofibrosarcoma, epithelioid sarcoma, Ewing's sarcoma, fibrosarcoma, gastrointestinal stromal tumors (GISTs), Kaposi sarcoma, leiomyosarcoma, liposarcoma, dedifferentiated liposarcoma (DL), myxoid/round cell liposarcoma (MRCL), well-differentiated liposarcoma (WDL), malignant fibrous histiocytoma, neurofibrosarcoma, rhabdomyosarcoma (RMS), or synovial sarcoma;
(xxxiii) the spinal cancer is a spinal metastatic tumor;
(xxxiv) the stomach cancer is a stomach adenocarcinoma, stomach lymphoma, gastrointestinal stromal tumors, carcinoid tumor, gastric carcinoid tumors, Type I ECL-cell carcinoid, Type II ECL-cell carcinoid, or Type III ECL-cell carcinoid;
(xxxv) the testicular cancer is a seminoma, non-seminoma, embryonal carcinoma, yolk sac carcinoma, choriocarcinoma, teratoma, gonadal stromal tumor, leydig cell tumor, or sertoli cell tumor;
(xxxiv) the throat cancer is a squamous cell carcinoma, adenocarcinoma, sarcoma, laryngeal cancer, pharyngeal cancer, nasopharynx cancer, oropharynx cancer, hypopharynx cancer, laryngeal cancer, laryngeal squamous cell carcinoma, laryngeal adenocarcinoma, lymphoepithelioma, spindle cell carcinoma, verrucous cancer, undifferentiated carcinoma, or lymph node cancer;
(xxxv) the thyroid cancer is a papillary carcinoma, follicular carcinoma, Hürthle cell carcinoma, medullary thyroid carcinoma, or anaplastic carcinoma;
(xxxvi) the uterine cancer is an endometrial cancer, endometrial adenocarcinoma, endometroid carcinoma, serous adenocarcinoma, adenosquamous carcinoma, uterine carcinosarcoma, uterine sarcoma, uterine leiomyosarcoma, endometrial stromal sarcoma, or undifferentiated sarcoma;
(xxxvii) the vaginal cancer is a squamous cell carcinoma, adenocarcinoma, melanoma, or sarcoma; or
(xxxviii) the vulvar cancer is a squamous cell carcinoma or adenocarcinoma;
(ii) cancer antigen is an angiopoietin, BCMA, CD19, CD20, CD22, CD25 (IL2-R), CD30, CD33, CD37, CD38, CD52, CD56, CD123 (IL-3R), cMET, DLL/Notch, EGFR, EpCAM, FGF, FGF-R, GD2, HER2, Mesothelin, Nectin-4, PAP, PDGFRα, PSA, PSA3, PSMA, RANKL, SLAMF7, STEAPI, TARP, TROP2, VEGF, or VEGF-R antigen; and/or
(iii) the cancer antigen is a CEA, immature laminin receptor, TAG-72, HPV E6, HPV E7, BING-4, calcium-activated chloride channel 2, cyclin-B1, 9D7, EpCAM, EphA3, Her2/neu, telomerase, mesothelin, SAP-1, surviving, a BAGE family antigen, CAGE family antigen, GAGE family antigen, MAGE family antigen, SAGE family antigen, XAGE family antigen, NY-ESO-1/LAGE-1, PRAME, SSX-2, Melan-A, MART-1, Gp100, pmel17, tyrosinase, TRP-1, TRP-2, P. polypeptide, MC1R, prostate-specific antigen, β-catenin, or BRCA1 antigen.

68. (canceled)

69. The method of claim 66, wherein the cancer antigen is BCMA or PSMA; wherein optionally the cancer is a lymphoma, leukemia or prostate cancer.

70. The method of claim 69, wherein the cancer cell is a B cell or a prostate cancer cell; wherein optionally the cancer is a lymphoma, leukemia or prostate cancer.

71.-75. (canceled)
